United States Patent Application Publication US 2026/0297597 A1, published October 1, 2026 (application 19/479,485).

The application's sequence listing, which the Patent Office published only in electronic form, follows.

SEQUENCE LISTING (2878 sequences)

SEQ ID NO: 1 - DNA, 134 bp, Tobacco mosaic virus
  source 1..134: mol_type = other DNA
taggtttgagagagaagattacaaacgtgagagacggagggcccatggaacttacagaagaagtcgttgatgagttcatggaagatgtccctatgtcgatcaggcttgcaaagtttcgatctcgaaccggaaaa

SEQ ID NO: 2 - DNA, 198 bp, Tobacco mild green mosaic virus
  source 1..198: mol_type = other DNA
aaggtttgagggaacgtattttgagtgtgacagacggctcgccaattgaactcactgaaaaggttgttgaggagttcgtggatgaagtaccaatggctgtgaaactcgaaaaggttccggaaaacaaaaaagaaatggtaggtaataatgttaataataagaaaataaataacagtggtaagaagggttttaaaattg

SEQ ID NO: 3 - DNA, 133 bp, Tomato mosaic virus
  source 1..133: mol_type = other DNA
tgggtttgagggagaaagtaacgagtgtgaacgatggaggacccatggaactttcagaagaagttgttgatgagttcatggagaatgttccaatgtcggttagactcgcaaagtttcgaaccaaatcctcaaa

SEQ ID NO: 4 - DNA, 134 bp, Pepper mild mottle virus
  source 1..134: mol_type = other DNA
taggcttgagagagaaaattactagtgtgtcagaaggaggacccgttgaacttacagaagcagtcgttgatgagttcatcgaatcagttccaatggctgacagattacgtaaatttcgcaatcaatctaagaaa

SEQ ID NO: 5 - DNA, 139 bp, Paprika mild mottle virus
  source 1..139: mol_type = other DNA
aaggtttacgagagaaagtgactacagtgtcagaggacagcgctattgaacttacagaggaagttgttgatgagttcatagaggcagtaccgatggcacgtcggttgcaaaatttcaggaaacccaaaaataatattag

SEQ ID NO: 6 - DNA, 134 bp, Bell pepper mottle virus
  source 1..134: mol_type = other DNA
tgggtttgagggagaagattacaagagtaaccgacgccgggcctatggaacttactgaagaagttgttgatgagttcatagagaatgtcccgatggcggcaaggcttgcaagatttcgaaccaaatcctcaaaa

SEQ ID NO: 7 - DNA, 138 bp, Tomato mottle mosaic virus
  source 1..138: mol_type = other DNA
tgggtttgagggagaagattacaagagtggatgacgcaggtcccattgaacttaccgaagaagttgttgatgagttcatggagagtgtgcctatgtcagtcaggcttgctaaatttcgaaccaaatcctcaaaaagag

SEQ ID NO: 8 - DNA, 135 bp, Odontoglossum ringspot virus
  source 1..135: mol_type = other DNA
tcggactgagagagaagattttgaacgtaacagaaggagggcccaccgaacttactgaagcagttgttgatagattcgtggagaaagttcctatggctgctaggctcaagtcttttcgctctgtcaacaaaaaga

SEQ ID NO: 9 - DNA, 201 bp, Obuda pepper virus
  source 1..201: mol_type = other DNA
agggtctaagagagaaggtgactgccgtgtccgaagacgacgctatagaactcacagaagaggttgttgatgagtttatagaagccgtaccgatggcgcgacgtttgcagaacttgagaaaacccaagtacaacaaagaaaaagaaaataaaaatttgaataataaaaatagtataggagtttccaaacctgtcggtttag

SEQ ID NO: 10 - DNA, 136 bp, Rehmannia mosaic virus
  source 1..136: mol_type = other DNA
tgggtttgagggagaaaatcacaactgtgaaagatggaggacccatggaactcaccgaagaagtggtagacgagttcatggaagacgttccaatgtctgtcagacttgcgaagtttcgatctcgaaccggaaaaaa

SEQ ID NO: 11 - DNA, 134 bp, Brugmansia mild mottle virus
  source 1..134: mol_type = other DNA
aaggattgcgtgaaaggatcacgaatgttgccgaaggcggttcacttgagctcactgaagaagttgttgagagctttgtgaatgacgtccctatggcagtacgactgaaccatttacgtaatggaaacaaaaaa

SEQ ID NO: 12 - DNA, 134 bp, Yellow tailflower mild mottle virus
  source 1..134: mol_type = other DNA
ccggtctgagagagaaagtaacttccgtgtcagaagggtctccgattgaactcacagaagatgttgtagatgagtttttcgagagtgtccctatggctcgtaggttgcagaacttgaggaataggcgaggaaat

SEQ ID NO: 13 - DNA, 137 bp, Tropical soda apple mosaic virus
  source 1..137: mol_type = other DNA
ttggactgagggagaaaattacaaatgtctcagacggaggacccgtcgaacttacagaagaagttgttgatgagttcgtcgaatcagttcctatggctgagagattacgtaaatttcgaggacggtccaacaaaaag

SEQ ID NO: 14 - DNA, 432 bp, Cucumber green mottle mosaic virus
  source 1..432: mol_type = other DNA
taccctcgtctgtcgtagatattaattctagattcccagatgcgggtttttacgctttcctcaacggtcctgtgttgaggcctatcttcgtttcgcttctcagctccacggatacgcgtaatagggtcattgaggttgtagatcctagcaatcctacgactgctgagtcgcttaacgctgtaaagcgtactgatgacgcgtctacagccgctagggccgagatagataatttaatagagtctatttctaagggttttgatgtttacgatagggcttcatttgaagccgcgttttcggtagtctggtcagaggctaccacctcgaaagcttagtttcgagggtcttctgatggtggtgcacaccaaagtgcatagtgctttcccgttcacttaaatcgaacggtttgctcattggtttgcggaaacctctcac

SEQ ID NO: 15 - DNA, 347 bp, Cucumber fruit mottle mosaic virus
  source 1..347: mol_type = other DNA
tttttgtccttattatgctttgtatgatctgttggtgtcagcccaaggtggagccctgcaaacgcaaaatggtaaagacattttgcgtgactccataaatgggttgttaacgacagttgcgtctcctaggagtcggttccctgcggaagggttctttgtctggtcccgtgagtcgcgcattgctgctatattagattctctgctttcggcgttggattcaagaaatagggctattgaagttgaaaacccttctaatccttcgaccagtgaagctttgaatgctactaagcgcaatgacgacgcgtctactgctgcgcacaacgacattcctcagctgatttcagctt

SEQ ID NO: 16 - DNA, 297 bp, Kyuri green mottle mosaic virus
  source 1..297: mol_type = other DNA
tgttaacttctgttgcgtctctcaattcacgttttcctgctaatgagtttttcgtgtggtctcgtgagtcgcgcattgctgccataatcgattcgttgttatccgctttggattctagaaatagggctatcgaagttgaaaacccttctaatccttctaccggagaagctctgaatgcgaccaagcgcaatgacgacgcgtctacagccgcgcacaacgacattcctctgcttttagcagctctgaatgacggtgtgggcgtttttgatagtgcgtcttttgagtcagctttcggtc

SEQ ID NO: 17 - DNA, 335 bp, Zucchini green mottle mosaic virus
  source 1..335: mol_type = other DNA
tgctgtcttctgttgcgtcacccacttcacagtttccttccggtgtgttttatgtgtggtctcgtgagtcgcgcattgctgctttgatcgattctctcttcggtgctttggattcaagaaatagggctattgaagttgaaaacccttctaatccatcgactggcgaagctttgaacgcggttaagcgcaatgacgacgcgtctacagccgctcacaacgacattcctcagattttatctgctctgaatgaaggtgcgggcgtttttgatagagcgtcttttgaatctgcttttggtctcgtgtggaccgcaggttcgtctacctcgtcttgaggc

SEQ ID NO: 18 - DNA, 238 bp, Cucumber mottle virus
  source 1..238: mol_type = other DNA
tcttttcctcgcccgtgagtcctaccgtcagatttcctgacggagttttttatgtgtttttaggtaatcctgttttggatccgctttttaaagctctgttacagtcgttggatacaagaaatagggtcatagaggttgataacccttctaatcctacgactgctgagtctttaaacgctgtccagcgtactgacgattctactgtcagttcgcgtgtgggtttaataaacttgcgtgc

SEQ ID NO: 19 - DNA, 238 bp, unidentified
  source 1..238: mol_type = other DNA
ttttcacctctcctgtgagtccgaccgttagatttcctgacggtccgtttttcattttcttagggaatcctgtgttggatccgctttttaaagctcttctgcagtcgctggatacaagaaatagggttattgaggttgacaatccttctaatcctactactgcggaatctttgaacgcgattcagcgtactgacgactcttccgtcagttcgcatgtcggtctagttaaccttcgcgc

SEQ ID NO: 20 - DNA, 246 bp, Turnip vein-clearing virus
  source 1..246: mol_type = other DNA
agggtttgagggaaaaggtcgtcgcaataaatgatccggacgtcgaaggtttcgaaggtgtggttgacgaattcgtcgattcggttgcagcatttaaagcggttgacaatttcaggaagaggaaaaagaaggttgaagaaagggatgtagtaagtaagtataaatatagaccggagaaatacgccggtcctgattcgtttaatttaaaagaagaaaatgtcttacaacattacaaacccgaatcag

SEQ ID NO: 21 - DNA, 246 bp, Ribgrass mosaic virus
  source 1..246: mol_type = other DNA
agggtttgagagaaaagatcatcgcgataagtgatccggacgtcgaaggtttcgaaggagtggttgacgatttcgttgattcggtcgaagcatttagagcggttgataatttcaggaaaaagaaaaggaagataggagaaaaggaagcggtaagtaggaataagtacagaccggagaaacacgccggtcctaattcgttatatattaaagaagaaaatgtcttacaacatcacgagctcgaatcag

SEQ ID NO: 22 - DNA, 246 bp, Wasabi mottle virus
  source 1..246: mol_type = other DNA
agggtttaagagaaagagtcatcgctgtagatgatccgaacgttgagggtttcgaaggtgtagttgacgaattcatcgattcggttgcagcatttaaagcggttgacaatttcaggaaaaagaaaaggaagattggaggaagggatgtgattagtaagtataagtatagaccagagaagtacgccggtcctgattcgttacttaataaagaagaaaatgtcatacaacatcacgaactcgaatcag

SEQ ID NO: 23 - DNA, 249 bp, Youcai mosaic virus
  source 1..249: mol_type = other DNA
aaggtttgagggaaaaagtcatcgctgtgaatgatccgaacgtcgaaggtttcgaaggtgtggttgacgatttcgtcgattcggttgctgcattcaaggcgattgacagtttcaggaagaaaaagaaaaggattggaggaagggatgtaaatagtaataagtatagatatagaccggagagatacgccggtcctgattcgttacaatataaagaagaaaatggtttacaacatcacgagctcgaatcag

SEQ ID NO: 24 - DNA, 258 bp, Streptocarpus flower break virus
  source 1..258: mol_type = other DNA
agggtttgcgtgaaaggcttaataatgtgggagatccaaatgttgaagtttcagaagttgtcgttgatgagttcgtggactcgatttccgcttcacagtcgttaagccgtgctcgtaataaatacgttcgtggtaatggtaaggttgggaataatagtggtggttttagtaagtataatcgtcatcagccggagaggttcgccggcaaggctatgtataattctaaaaatgtcgtacgtggtggtacttccgaaccaa

SEQ ID NO: 25 - DNA, 333 bp, Rattail cactus necrosis-associated virus
  source 1..333: mol_type = other DNA
tgcttttatgacaggatcttacccaacaattcgactgtgctcaacgactatgacagtttcaccttgagagtgagagacattcatctcaacttggacgattgtagactcgacctgtcaaaggacgatccagcaatctgtcggaggcagtcgggttatctgcgtcccgttcttagaaccggtacggagagacctcgacagcccgggctcattgagaatgtcttagctcttatcaagagaaatttcaatgcacctcatcttcttggaactgtagacgtcgatgcaatggccgacaccgtagtggataagttttttaaaattttcttccctgatggt

SEQ ID NO: 26 - protein, 159 aa, Tobacco mosaic virus
MSYSITTPSQFVFLSSAWADPIELINLCTNALGNQFQTQQARTVVQRQFSEVWKPSPQVTVRFPDSDFKVYRYNAVLDPLVTALLGAFDTRNRIIEVENQANPTTAETLDATRRVDDATVAIRSAINNLIVELIRGTGSYNRSSFESSSGLVWTSGPAT

SEQ ID NO: 27 - protein, 159 aa, Tobacco mild green mosaic virus
MPYTINSPSQFVYLSSAYADPVQLINLCTNALGNQFQTQQARTTVQQQFADAWKPVPSMTVRFPASDFYVYRYNSTLDPLITALLNSFDTRNRIIEVDNQPAPNTTEIVNATQRVDDATVAIRASINNLANELVRGTGMFNQAGFETASGLVWTTTPAT

SEQ ID NO: 28 - protein, 159 aa, Tomato mosaic virus
MSYSITSPSQFVFLSSVWADPIELLNVCTNSLGNQFQTQQARTTVQQQFSEVWKPFPQSTVRFPGDVYKVYRYNAVLDPLITALLGAFDTRNRIIEVENQQSPTTAETLDATRRVDDATVAIRSAINNLVNELVRGTGLYNQNTFESMSGLVWTSAPAS

SEQ ID NO: 29 - protein, 157 aa, Pepper mild mottle virus
MAYTVSSANQLVYLGSVWADPLELQNLCTSALGNQFQTQQARTTVQQQFSDVWKTIPTATVRFPATGFKVFRYNAVLDSLVSALLGAFDTRNRIIEVENPQNPTTAETLDATRRVDDATVAIRASISNLMNELVRGTGMYNQALFESASGLTWATTP

SEQ ID NO: 30 - protein, 161 aa, Paprika mild mottle virus
MPYTVSSPNQLVYFGSVWADPIALIDLCTVSLGNQFQTQNARTTVQQQFSDLFKTVPTRTIRFSDGENGFRVFRYNSTLDPLITALLNSFDTRNRIIETENPANPNTAEIASATQRVDDATVSIRACINNLMNELARGTGMLNTASFETVSNLTWTTAATT

SEQ ID NO: 31 - protein, 160 aa, Bell pepper mottle virus
MSYTVNSPSQLVYLSSAWADPTDLLNLCTNSLGNQFQTQQARTTVQQQFSDVWKPTPQAGVRFPASGFKVYRYNAVLDPLITALLGTFDTRNRIIEVENQQNPTTAETLDATRRVDDATVAIRSAINNLANELVRGTGMYNQTSFESMAGLTWTTTPPSG

SEQ ID NO: 32 - protein, 159 aa, Tomato mottle mosaic virus [sequence omitted]

SEQ ID NO: 33 - protein, 158 aa, Odontoglossum ringspot virus
MSYTITDPSKLAYLSSAWADPNSLINLCTNSLGNQFQTQQARTTVQQQFADVWQPVPTLTSRFPAGAGHFRVYRYELILEPLITFLMGTFDTRNRIIEVRNPQNPTTTETLDATRRVDDATVAIRSAINNLLNELVRGNGMYNQVSFETMSGLTWTSS

SEQ ID NO: 34 - protein, 161 aa, Obuda pepper virus
MPYTVTSPSQLVYFGSVWADPITFIDLCTVALGNQFQTQNARTTVQQQFSDLFKTVPTRTNRFNDGENGFRVFRYNSTLDPLISALMNSFDTRNRIIEVDNPANPNTSEVASATQRVDDATVNIRACINNLMNELVRGTGMMNTASFETVSNLTWTTTTTT

SEQ ID NO: 35 - protein, 159 aa, Rehmannia mosaic virus
MSYTIATPSQFVYLSSAWADPVELINLCTNALGNQFQTQQARTVVQRQFSEVWKPSPQVTVRFPANDFKVYRYNAVLDPLVTALLGAFDTRNRIIEVENQANPTTAETLDATRRVDDATVAIRSAINNLVVELIRGTGSYNRSAFESSSGLVWTSGPAT

SEQ ID NO: 36 - protein, 159 aa, Brugmansia mild mottle virus
MAYTITAPNQIVYLGVAYADPILLMNLCTTSQGNQFQTQNARTTVQQQFADIWKAVPAVNIRFPENGFLVYRYNAVLDQLVTSLLNSFDTRNRIIEVENPPNPTNGEIMSATQRVDDATVNIRASITNLMNELVRGTGFLNRSSFESTSGLTWSTAPTT

SEQ ID NO: 37 - protein, 158 aa, Yellow tailflower mild mottle virus
MSYAITSPKQFAYLTNAYADPIALISLCNNALGNQFQTQNARTTVQQQFNDIWKELPTQISRFPVGIYRVYRFDSTIDPLITSVLNSFDTRNRIIETENPANPSTTEVVNATQRVDDATVNIRSSINNLCNELIRGTGFLNQATFEEASQLTWTARTT

SEQ ID NO: 38 - protein, 160 aa, Tropical soda apple mosaic virus
MSYTISNPNQLVYLASVWADPTELLNLCTSALGNQFQTQQARTTVQQQFSDVWKTVPATNIRFPNAGFKVYRYNAVLDSLITALLGSFDTRNRIIEVENPQNPTTAETLDATRRVDDATVAIRSSINNLMNELVRGTGMYNQAQFESVSGLTWATTATSS

SEQ ID NO: 39 - protein, 161 aa, Cucumber green mottle mosaic virus
MAYNPITPSKLIAFSASYVPVRTLLNFLVASQGTAFQTQAGRDSFRESLSALPSSVVDINSRFPDAGFYAFLNGPVLRPIFVSLLSSTDTRNRVIEVVDPSNPTTAESLNAVKRTDDASTAARAEIDNLIESISKGFDVYDRASFEAAFSVVWSEATTSKA

SEQ ID NO: 40 - protein, 162 aa, Cucumber fruit mottle mosaic virus
MSYSTSGLRSLPAYTKSFCPYYALYDLLVSAQGGALQTQNGKDILRDSINGLLTTVASPRSRFPAEGFFVWSRESRIAAILDSLLSALDSRNRAIEVENPSNPSTSEALNATKRNDDASTAAHNDIPQLISALNDGAGVFDRASFESQFGLVWTAASSSTSK

SEQ ID NO: 41 - protein, 161 aa, Kyuri green mottle mosaic virus
MSYSTSGIRSLPAFAKSFYPFYDVYNLLVSAQGGALQTQNGKDILRESLTGLLTSVASLNSRFPANEFFVWSRESRIAAIIDSLLSALDSRNRAIEVENPSNPSTGEALNATKRNDDASTAAHNDIPLLLAALNDGVGVFDSASFESAFGLTWTASATSSK

SEQ ID NO: 42 - protein, 161 aa, Zucchini green mottle mosaic virus
MPYSTSGIRSLPAFSKSFFPYLELYNLLITNQGAALQTQNGKDILRESLVGLLSSVASPTSQFPSGVFYVWSRESRIAALIDSLFGALDSRNRAIEVENPSNPSTGEALNAVKRNDDASTAAHNDIPQILSALNEGAGVFDRASFESAFGLVWTAGSSTSS

SEQ ID NO: 43 - protein, 162 aa, Cucumber mottle virus
MAYSPITPTNLSLFSSNYVPFTEFYNYLVTAQGEAFQTQQGRDSVRDSLSGFFSSPVSPTVRFPDGVFYVFLGNPVLDPLFKALLQSLDTRNRVIEVDNPSNPTTAESLNAVQRTDDSTVSSRVGLINLRAAITQGNGVVNRSIFESSNGLTWATSGSSSSK

SEQ ID NO: 44 - protein, 162 aa, unidentified
MAYTPITPTNLPLFSSNYVPYTEFYNYLVSAQGEAFQTQQGRDAVRTTLSGFFTSPVSPTVRFPDGPFFIFLGNPVLDPLFKALLQSLDTRNRVIEVDNPSNPTTAESLNAIQRTDDSSVSSHVGLVNLRAAIAQGNGVVNRSIFESSSGLTWATSSASTSK

SEQ ID NO: 45 - protein, 157 aa, Turnip vein-clearing virus
MSYNITNPNQYQYFAAVWAEPIPMLNQCMSALSQSYQTQAARDTVRQQFSNLLSAVVTPSQRFPDTGSRVYVNSAVIKPLYEALMKSFDTRNRIIETEEESRPSASEVANATQRVDDATVAIRSQIQLLLSELSNGHGYMNRAEFEALLPWTTAPAT

SEQ ID NO: 46 - protein, 157 aa, Ribgrass mosaic virus
MSYNITSSNQYQYFAAVWAEPTPMLNQCVSALSQSFQTQAGRDTVRQQFSNLLSAIVAPNQRFPDTGFRVYVNSAVIKPLYEALMKSFDTKNRIIETEEESRPSASEVANATQRVDDATVAIRSQIQLLLNELSNGHGYMNRAEFEAILPWTTAPAT

SEQ ID NO: 47 - protein, 157 aa, Wasabi mottle virus
MSYNITNSNQYQFFAAVWAEPIAMLNQCISALSQSYQTQAARDTVRQQFSNLLSAIVTPNQRFPETGYRVYVNSAVLKPLYEALMKSFDTRNRIIETEEESRPSASEVANATQRVDDATVAIRSQIQLLLSELSSGHGLMNRAEFEVLIPWATAPAK

SEQ ID NO: 48 - protein, 157 aa, Youcai mosaic virus
MVYNITSSNQYQYFAAMWAEPTAMLNQCVSALSQSYQTQAARDTVRQQFSNLLSAIVTPNQRFPEAGYRVYINSAVLKPLYESLMKSFDTRNRIIETEEESRPSASEVANATQRVDDATVAIRSQIQLLLNELSNGHGLMNRAEFEVLLPWATAPAT

SEQ ID NO: 49 - protein, 157 aa, Streptocarpus flower break virus
MSYVVVLPNQLQFFTNAWADPIQLMNLCSASLSQIFQTQAARDAVREQFGNTLRSVVTQTTRFPEAGFQVYINDAALKPLWENLLKSFDTKNRILETEEETRPSTAEVLNATQRVDDSTTAIRGALQRLSDELNRGSGYMNRTSFETILLWSAATAK

SEQ ID NO: 50 - protein, 170 aa, Rattail cactus necrosis-associated virus
MPYINVQPKDFVYLTRSWVDPQRLIQFLSDMQTQAFQAQQSRTQLLNELSTMVVYGPTKSDRFPIDTYLINITKGGLSAYWFGLTQSADTKDRVFEVSEARAVTNAESKLATQRVDDATVAIRNAIKSTLSYLIAGEDIYSRTSFEAALGWIWQENLPPPPQTAASDSRT

SEQ ID NO: 51 - protein, 268 aa, Tobacco mosaic virus
MALVVKGKVNINEFIDLTKMEKILPSMFTPVKSVMCSKVDKIMVHENESLSEVNLLKGVKLIDSGYVCLAGLVVTGEWNLPDNCRGGVSVCLVDKRMERADEATLGSYYTAAAKKRFQFKVVPNYAITTQDAMKNVWQVLVNIRNVKMSAGFCPLSLEFVSVCIVYRNNIKLGLREKITNVRDGGPMELTEEVVDEFMEDVPMSIRLAKFRSRTGKKSDVRKGKNSSNDRSVPNKNYRNVKDFGGMSFKKNNLIDDDSEATVAESDSF

SEQ ID NO: 52 - protein, 256 aa, Tobacco mild green mosaic virus
MAVSLRDTVKISEFIDLSKQDEILPAFMTKVKSVRISTVDKIMAVKNDSLSDVDLLKGVKLVKKGYVCLADLVVSGEWNLPDNCRGGVSVCIVDKRMKRSKEATLGAYHAPACKKNFSFKLIPNYSITSEDAEKHPWQVLVNIKGVAMEEGYCPLSLEFVSICVVHKNNVRKGLRERILSVTDGSPIELTEKVVEEFVDEVPMAVKLEKVPENKKEMVGNNVNNKKINNSGKKGFKIEEIEDNVSDDESIASSSTF

SEQ ID NO: 53 - protein, 264 aa, Tomato mosaic virus
MALVVKGKVNINEFIDLSKSEKLLPSMFTPVKSVMVSKVDKIMVHENESLSEVNLLKGVKLIEGGYVCLVGLVVSGEWNLPDNCRGGVSVCMVDKRMERADEATLGSYYTAAAKKRFQFKVVPNYGITTKDAEKNIWQVLVNIKNVKMSAGYCPLSLEFVSVCIVYKNNIKLGLREKVTSVNDGGPMELSEEVVDEFMENVPMSVRLAKFRTKSSKRGPKNNNNLGKGRSGGRSKPKSFDEVEKEFDNLIEDEAETSVADSDSY

SEQ ID NO: 54 - protein, 257 aa, Pepper mild mottle virus
MALVVKDDVKISEFINLSAAEKFLPAVMTSVKTVRISKVDKVIAMENDSLSDVNLLKGVKLVKDGYVCLAGLVVSGEWNLPDNCRGGVSVCLVDKRMQRDDEATLGSYRTSAAKKRFAFKLIPNYSITTADAERKVWQVLVNIRGVAMEKGFCPLSLEFVSVCIVHKSNIKLGLREKITSVSEGGPVELTEAVVDEFIESVPMADRLRKFRNQSKKGSNKYVGKRNDNKGLNKEGKLFDKVRIGQNSESSDAESSSF

SEQ ID NO: 55 - protein, 269 aa, Paprika mild mottle virus
MSSKSIVNIEEFINMSKAEEVLPAALTRMKSVRISTVDKIMATDNDNISEVDLLKGVKLIKNGYVCLVGLVVSGEWNLPDNCRGGVSVCLIDKRMQRHNEATLGSYTAKASKKNFSFKLIPNYSITSQDAERRPWEVMVNIRGVAMEEGWCPLSLEFVSVCIVHKNNVRKGLREKVTTVSEDSAIELTEEVVDEFIEAVPMARRLQNFRKPKNNISKNFVNKGSSKPRNIPKLNEDKVFKLEKGLKGVKGMTNASRDDSSSEISSDSFN

SEQ ID NO: 56 - protein, 278 aa, Bell pepper mottle virus
MAIVVKDKVNVNDFINLSNSEKYLPSNSEKYLPSLMTPVKSVRISKVDKVLARENETLSEVDLLKGVKLIEGGYICLAGLVVTGEWNLPDNCTGGVSVCLVDKRMERASEATLGSYYTGAAKKRFQFKVTPNYSVTTDDAKKNIWQVLVNIKGVRMSAGFCPLSLEFVSVCIVFKNNIKLGLREKITRVTDAGPMELTEEVVDEFIENVPMAARLARFRTKSSKTGPKKFVRNSRDSKVRSNNLNRGVRPKFEEEGIVSDKLINDESESIDADSDSYL

SEQ ID NO: 57 - protein, 268 aa, Tomato mottle mosaic virus
MALTVSGKVRISEFIDLSKSERLLPSMFTHVKSVSVSKVDKVMVNEEDSLSEVNLLKGVKLIDGGYVCLAGLVVSGEWNLPDNCRGGVSICLVDKRMQRADEATLGSYYTGAAKKRFQFKIVPNYAITTKDAERNIWQVLVNIRNVKMAGGFCPLSLEFVSVCIVYKNNIKLGLREKITRVDDAGPIELTEEVVDEFMESVPMSVRLAKFRTKSSKRGPKHNSNNTNERKGRSNFRKKQDQESYGVSDSLDNLIEDDTETSVAGSDSY

SEQ ID NO: 58 - protein, 303 aa, Odontoglossum ringspot virus
MGRLRFVVLLSIFPIKTFSEPCYTMALVLRDSIKISEFINLSAFEKLLPSALTAVKSVRIPKVDKIISYENDTLSDIDLLKGVKLVENGYVCLAGLVVTGEWNLPDNCKGGVSICLVDKRMKRANEATLGSYHTSACKKRFTFKIIPNYSVTTADALKGIWQVMTNIRGVEMEKGFCPLSLEFVSICVVYLNNIKLGLREKILNVTEGGPTELTEAVVDRFVEKVPMAARLKSFRSVNKKKPSNSSKFVNGKSRLNSRNKLNYENGDSDVGTSVVDDIVVGNGVSDIRIDDDCESFDAQSESY

SEQ ID NO: 59 - protein, 274 aa, Obuda pepper virus
MSKAIVKIDEFIKLSKSEEVLPSAFTRMKSVRVSTVDKIMAKENDNISEVDLLKGVKLVKNGYVCLVGLVVSGEWNLPDNCRGGVSICLIDKRMQRHNEATLGSYTTKASKKNFSFKLIPNYSITSQDAERRPWEVMVNIRGVAMSEGWCPLSLEFVSVCIVHKNNVRKGLREKVTAVSEDDAIELTEEVVDEFIEAVPMARRLQNLRKPKYNKEKENKNLNNKNSIGVSKPVGLERNKVRSVVRKGVRSDSSLGVTDMSQDGSSSEISSDSFI

SEQ ID NO: 60 - protein, 267 aa, Rehmannia mosaic virus
MALVVKGKVNIGEFIDLTKTEKLLPSMFTPVKSVMCSKVDKVMVHENESLSEVNLLKGVKLIENGYVCLAGLVVTGEWNLPDNCRGGVSVCLVDKRMERADEATLASYYTAAAKKRFQFKVVPNYAITTHDAMKNVWQVLVNIRNVKMSAGFCPLSLEFVSVCIVYRNNIKLGLREKITTVKDGGPMELTEEVVDEFMEDVPMSVRLAKFRSRTGKKNNVKKVKFEGVDRSVPKMNKGKSRNNGGVFERNIFIDNDSETNVAEPDSF

SEQ ID NO: 61 - protein, 271 aa, Brugmansia mild mottle virus
MTLSIRDSFKIDEFINLSKVEKAVPALFSRVKTVRVSTVDKIMATKNDSLSDVDLLKGVKLVNNGYVCLVGLVVSGEWNLPDNCKGGVSVCLVDKRMKRANEATLGSYHSRACKKNFSFKLIPNYSITTADAEKQPWQVLVNIRGVQMEQGYCPLSLEFVSVCIVHKNNVRKGLRERITNVAEGGSLELTEEVVESFVNDVPMAVRLNHLRNGNKKEGFSKGKYVNNNAKERSVNKFVKKSVNGKGGLKVKEISTSVEDYNSSEVSSDSFI

SEQ ID NO: 62 - protein, 266 aa, Yellow tailflower mild mottle virus
MAIALRDTVKINEFINLSKTEEILPAMFTRMKSVRISTVDKVVAKENDSVSEVDLLKGVKLVKNGYVNLVGLVVSGEWNLPDNCRGGVSVCLVDRRMTRHSEATLGSYTAPACKKNFSFKLIPNYSVTTADAERRPWEVMVNIKGVAMAEGWCPLTLEFVCVCIVHKTNVRTGLREKVTSVSEGSPIELTEDVVDEFFESVPMARRLQNLRNRRGNINRNKSQVYKKKNKNNIGDALKERIDEVKDVENKRYDNDDYSIEESSDSY

SEQ ID NO: 63 - protein, 256 aa, Tropical soda apple mosaic virus
MALVVKDDVKISEFINLSTSEKFLPAAMTSVKSVRVSKIDKVIATENDSLSDVDLLKGVKLIEEGYVCLAGLVVSGEWNLPDNCRGGVSVCLVDKRMLRHDEATLGSYKTGAAKKRFAFKLIPNYSVTTADAKRNIWQVLVNIKGVAMEKGFCPLSLEFVSVCIVHKTNIKLGLREKITNVSDGGPVELTEEVVDEFVESVPMAERLRKFRGRSNKKSNKFVEKNNNKRGDKGGKLLKKIDNETETESSDAESSSY

SEQ ID NO: 64 - protein, 264 aa, Cucumber green mottle mosaic virus
MSLSKVSVENSLKPEKFVKISWVDKLLPNYFSILKYLSITDFSVVKAQSYESLVPVKLLRGVDLTKHLYVTLLGVVVSGVWNVPESCRGGATVALVDTRMHSVAEGTICKFSAPATVREFSVRFIPNYPVVAADALRDPWSLFVRLSNVGIKDGFHPLTLEVACLVATTNSIIKKGLRASVVESVVSSDQSIVLDSLSEKVEPFFDKVPISAAVMARDPSYRSRSQSVGGRGKRHSKPPNRRLDSASEESSSVSFEDGLQSDHT

SEQ ID NO: 65 - protein, 258 aa, Cucumber fruit mottle mosaic virus
MSISKVGVRNALKPEEFVKITWVDKLLPDAFTILKYLSITDYSVVQSKDYEHLIPVDLLRGVDFSKSKYVTLVGVVISGVWTIPENCAGGATVALVDTRMSLVSEGTICKFSVSAASRDFTVKLIPNYYVTAADASSKPWSLFVRISGVRIKDGFSPLTLEIASLVATTNSILKKGLRVSVIESVVGSDASVSLDTLSEKVQPFFDSVPITASVVSRDRSYVSKGRPPSRSGPVSRKSKSKSEAESFSDSGASEPLSS

SEQ ID NO: 66 - protein, 262 aa, Kyuri green mottle mosaic virus
MSVSSVGVKNALKPQEFVKLSWVDKVLPDMFTVFRYLSVTDYSVIKSRDSECLIPVDLLRGVDLSKSKYVTLVGVVISGVWTIPENCAGGATVALVDTRMSMVDEGTICKFSVAASTRDFMVKLIPNYYVTASDASSKPWSIFVRVSGVRIKEGFSPLTLEIASLVATTNSILKKGLRVSVLESVVGSDASINLDSVSDKVQPFFDSVPITAAVIARDRSYVSKSGPSRAVRPRPQSKSGKKGDANPAESMSDGDAYEPPRL

SEQ ID NO: 67 - protein, 261 aa, Zucchini green mottle mosaic virus
MSVSKLGVKNVLKPQEFVKLNWVDKVLPDMFTVFRYLSVTDYSVIKSRDSECLIPVDLLRGVDLSKSKYVTLVGVVISGVWTIPENCAGGATVALVDTRMSMVDEGTICKFSVAASARDFMVKLIPNYYVTATDASSKPWSIFVRVSGVRIKEGFSPLTLEIASLVATTNSILKKGLRVSVLESVVGSDASVNLESASEKVQPFFDSVPITAAVISRDRSYVSKSGFNRAVRSKPPSKGGKKFGDSAESLSEDSASELPGL

SEQ ID NO: 68 - protein, 262 aa, Cucumber mottle virus
MSISNLSVESQLKPSNFVKLSWVDKLLPDYFSILRFLSVTDHSVIKAREYESFLPVELLRGVDLTKHKYVTLLGVVISGVWTIPEGCSGGATVGLVDTRMERVVEGTVCKFSVPASVREFNVRFIPNYSITAADAARHPWSLFVRLKGVNIKDSFSPLTLEIAALVATTNSIIKKSLKAIVSDVVVGSDAAVAIADRDSQVNSFFDSVPITKSVVNFDKSYKSRVPKKDSSGGSGKVKRSTGTSGPADTEFSDDGLLSNHSD

SEQ ID NO: 69 - protein, 262 aa, unidentified
MSISNLSVESQLKPSNFVKLSWVDRLLPDYFSILRFISVTDHSVVKAREYESFLPVELLRGVDLTKHKYVTLLGVVISGVWTIPEGCSGGATIGLVDTRMERVSEGTVCKFSVPASVREFNVRFIPNYSITASDAARHPWSLFVRLKGVSIKDSFSPLTLEIAALVATTNSIIKKSLKAVVSSVVVGSDAAVAIEDKDSSVNSFFDSVPITKSVINFDKSYKSKVPRKGSSVVSVKGKAGVGTSGPTDTEFSDYGLHSDHTD

SEQ ID NO: 70 - protein, 267 aa, Turnip vein-clearing virus
MSIVSYEPKVSDFLNLSKKEEILPKALTRLKTVSISTKDIISVKESETLCDIDLLINVPLDKYRYVGILGAVFTGEWLVPDFVKGGVTISVIDKRLVNSKECVIGTYRAAAKSKRFQFKLVPNYFVSTVDAKRKPWQVHVRIQDLKIEAGWQPLALEVVSVAMVTNNVVMKGLREKVVAINDPDVEGFEGVVDEFVDSVAAFKAVDNFRKRKKKVEERDVVSKYKYRPEKYAGPDSFNLKEENVLQHYKPESVPVLRSGVGRAHTNA

SEQ ID NO: 71 - protein, 267 aa, Ribgrass mosaic virus
MSMVSYEPKVNDFLFLTNKEKILPKALTRLKTVSISTKDIISVKESETLCDIDLLIDVPLDKYRYVGILGAVFTGEWLVPDFVKGGVTISVIDKRLVNSKECVIGTYRAAAKSKRFQFKLVPNYFVSTADAKRKPWQVHVRIQDVKIEAGWQPLALEVVSVAMVANNVVMKGLREKIIAISDPDVEGFEGVVDDFVDSVEAFRAVDNFRKKKRKIGEKEAVSRNKYRPEKHAGPNSLYIKEENVLQHHELESVPVLRSGVGRTHTNA

SEQ ID NO: 72 - protein, 267 aa, Wasabi mottle virus
MSTVSYKPKVSDFLSLSRTEEILPKALTRLKTVSVSTKDVISVKESESLCDIDLLVNVPLDKFRYVGILGVVFTGEWLIPDFVKGGVTVSVIDKRLENSKECIIGTYRAAAKDRRFQFKLVPNYFVSVTDAKRKPWQVHVRIQNLKIEAGWQPLALEVVSVAMVTNNVVVKGLRERVIAVDDPNVEGFEGVVDEFIDSVAAFKAVDNFRKKKRKIGGRDVISKYKYRPEKYAGPDSLLNKEENVIQHHELESVPVFCSGMGRAHSDA

SEQ ID NO: 73 - protein, 265 aa, Youcai mosaic virus
MSYEPKVSDFLALTKKEEILPKALTRLKTVSISTKDVISVKESESLCDIDLLVNVPLDKYRYVGVLGVVFTGEWLVPDFVKGGVTVSVIDKRLENSKECIIGTYRAAAKDRRFQFKLVPNYFVSVADAKRKPWQVHVRIQNLKIEAGWQPLALEVVSVAMVTNNVVVKGLREKVIAVNDPNVEGFEGVVDDFVDSVAAFKAIDSFRKKKKRIGGRDVNSNKYRYRPERYAGPDSLQYKEENGLQHHELESVPVFRSDVGRAHSDA

SEQ ID NO: 74 - protein, 288 aa, Streptocarpus flower break virus
MAIVLSKPKVSEFLNLTKAEEILPKFLTRLKTVAISTRDVVSVKGTTDLVDIDLLRDVPVNNWRYVGIVGIVASGEWLLPDNVSGGVAISFVDKRLVDSREAILGTYRAAAVEKRFQFKLIPNYFVSQEDALRRPWQVQVSLKGLKFEEGFSPLTLEFVSVVVCANSVVTKGLRERLNNVGDPNVEVSEVVVDEFVDSISASQSLSRARNKYVRGNGKVGNNSGGFSKYNRHQPERFAGKAMYNSKNVVRGGTSEPTAILHKRMGGSNSIDESLFSVAESDLSDSGCA

SEQ ID NO: 75 - protein, 334 aa, Rattail cactus necrosis-associated virus
MSSLCVSDPAVLLSPELHLKVPQLKSLVQFWKKPFKTCSISMSDVIKVASSNPLSIAVDFSSAMPSGPRNFKYVYILAVVLTGRWHLSESCPGGATFVLYDKRLCGRAEGIYGSFFSKVSASKFQVRFSVGHSMTVNDLLRNPLHLCFSLESVPCQEGYEPLSVEVSSLQLFTDCILEESLSAKLVKYPALCTDNMSVISNVDDVIFKFNSVLNVDNVPNSVKNVVKCNKVFKGRRSRGKWVGSQNEVVVKDGTNVTPHRLIAKDALHQRTTERLRLPDQVMGRPPASDTVSERYADSGFPSTAVSHTTSERTVDDGGLRSDQIGPFPYRYVPY

SEQ ID NO: 76 - DNA, 4759 bp, Arabidopsis thaliana
  source 1..4759: mol_type = genomic DNA
ttcattcatcatcttcctcctctctctcttctctgtatcacccaactaaatcctcacgggattagatccaaagtctcaaactttgatccaaaaacacaaactttgttcaaaagacataaactttgagccaaagtcacaagctttcttggtgaacgatggattacaatccaaatcttcctcctttaggaggaggtggtgttagtatgagaagaagcataagtcgaagtgtaagcagagcaagtaggaacattgaagatatcttctcatctggttcaagaagaacacaatcagtcaacgacgatgaagaagctcttaaatgggctgccattgagaagctaccaacttacagtcgtctccgaaccactctcatgaacgctgtagtcgaagacgatgtttacggtaaccagctcatgagcaaggaggttgatgtaaccaagcttgatggtgaagatcgtcagaagtttattgacatggttttcaaagtagctgagcaagataatgaaaggatcttgactaagctaagaaacaggatcgatagagttggtatcaaacttccaactgttgaagtcaggtacgagcatttgacgattaaagctgattgttacactggtaatagatctcttcctacacttttgaatgttgtgaggaacatgggagagtctgctttaggtatgattggtattcaatttgctaagaaagctcagcttacgattcttaaagatatctctggggttattaaacctggaaggatgacacttttgttgggtcctccttcttctggtaagaccactcttttgttggctttagctgggaaacttgataaatctctacaagtcagtggtgatattacttacaatggttaccaactcgatgagtttgttccgagaaagacctctgcttacattagtcagaacgatcttcatgttggtatcatgactgttaaggagactcttgacttctctgctaggtgtcaaggtgttggtactcgttatgatctgttgaatgagcttgcgaggagagaaaaggacgctggtatattcccggaagccgatgttgatctcttcatgaaagcttctgctgctcaaggtgttaagaacagtctcgtcactgattatactctcaaaattttggggcttgacatttgcaaagacacaatagttggagatgacatgatgagaggtatatctggaggtcagaagaaacgtgtcacaactggtgagatgattgttggacctactaagacactcttcatggacgaaatatccactggtcttgacagttccactactttccaaatcgtcaagtgtctgcaacaaatcgttcacctcaatgaagccacggtgctcatgtctctcctccagcctgctcctgagacttttgatttattcgatgatatcatcttggtgtcggaaggtcagatcgtgtaccaaggaccgagagacaacattcttgagttctttgagagctttgggttcaagtgtcctgagagaaaaggaacagctgatttcctgcaagaggttacttccaagaaagatcaagaacagtactgggtgaacccgaacagaccttatcactacattccggtttcagagtttgccagtagatacaagagtttccatgttgggacgaagatgtctaacgaacttgcagtaccgttcgataagtctcgcggccacaaagcagctcttgtgttcgataagtactctgtctcaaagagggagcttctcaagagctgttgggacaaagagtggctgcttatgcagcgaaacgcgttcttctatgttttcaagactgtccagatcgtcatcattgctgcaatcacgtctacactcttcctgagaaccgaaatgaacacaagaaacgagggtgatgctaatctctacataggagcattgctatttggaatgatcatcaacatgtttaatgggtttgcggagatggctatgatggtttcaagactccctgtgttctacaaacagagggatctcttgttttatccatcctggaccttctcacttcccactttcttgcttgggattccaagctcaatattagaatcgacggcttggatggtggtgacttattactccattggttttgcacctgacgccagccgcttcttcaagcagtttcttctggtgtttctgattcaacaaatggctgcatccctctttaggttgattgcttctgtgtgcagaaccatgatgattgctaatactggtggtgctctcactctacttcttgtgttcttgctcggaggcttccttcttccgaaaggcaagattcctgactggtggggttgggcttactgggtatctcctctcacctatgctttcaacggtctagtagtcaatgaaatgtttgctcccagatggatgaacaaaatggcttcttctaacagcacaataaagcttggaactatggtgcttaatacttgggatgtctaccatcaaaagaactggtactggatttcagttggagccttgctttgtttcacagccctcttcaacattctattcaccttggcacttacctatctcaaccctcttgggaagaaggcaggtttacttccagaagaagaaaatgaagacgctgatcaggggaaagatccaatgcgtagatctttgtctactgcagatgggaacagaagaggagaggtcgcaatggggagaatgagtagggactctgcggctgaagcatcaggtggtgcaggcaataagaaaggaatggttcttcctttcactcctttagctatgtcctttgacgacgtcaaatactttgttgacatgcctggggaaatgagagaccaaggagttacagaaacaagactccaactgcttaaaggtgtgactggtgcatttaggccaggagttttgactgcgcttatgggagtgagtggtgccggtaagactacgcttatggacgttttggccggaaggaaaacaggtggatacattgaaggagatgtgagaatatcaggattcccaaaggttcaagaaacatttgctagaatctcaggatattgtgagcagaccgatattcactccccgcaagtaacagtcagagaatctctgattttctctgctttccttcgtcttcctaaagaagtcggcaaagatgaaaaaatgatgtttgtggatcaagtgatggaattggtagagctggacagtcttagggactccattgttggtttaccgggtgtcacggggctttccacggagcagagaaagagactgacaatcgcggtggagcttgtagccaacccttccatcatctttatggatgagccaacttcagggctagacgctagagcagcggctattgtgatgagggcggtaaggaacacagtggacactggaagaaccgtggtctgcaccattcatcagcctagcattgatatctttgaagcatttgatgaattgatgctgatgaagagaggaggacaagtgatttacgcgggtccattgggtcaaaactctcacaaggtggttgagtactttgaatctttccccggagtgtccaagattccagaaaagtataacccggccacttggatgctcgaagctagctcactcgccgctgagctaaagcttagtgttgactttgctgagttatacaatcaatcagcattgcaccagcgaaacaaagcgttggtaaaagaactaagtgtaccaccagcaggagcatcagatctttactttgctacacaattctcacaaaacacatggggacagttcaaatcatgcttatggaaacaatggtggacgtattggagatctccagactacaatcttgtccgtttcatcttcacattggcaacatctctcttgattggtacagtcttctggcaaatcggaggtaacaggtcgaacgcaggggatctaacaatggtgataggagcattgtatgccgcgattatcttcgtgggaatcaacaactgttcaacagtacaaccgatggttgcagtggaaagaacagtgttctacagagaaagagcagcaggaatgtactcagccatgccatatgccatctctcaagtcacttgtgagcttccctatgtccttattcaaaccgtttactactcactcatcgtctacgccatggttggtttcgaatggaaagccgaaaagttcttctggttcgtcttcgttagctacttctcattcctctactggacttactacggcatgatgactgtttccctcacaccaaaccaacaagtcgcttcgattttcgcctcagcgttttacggtattttcaacctcttctctggtttcttcattccaagacccaaaatcccaaaatggtggatttggtactactggatctgccctgttgcatggaccgtgtatggattgatagtgtcgcagtacggtgatgtggagacacgtatccaagtccttggtggtgctcctgacttaaccgtcaagcaatacattgaggaccattatggtttccaatctgactttatgggaccagtggcggctgtactcatcgctttcaccgtcttcttcgccttcatcttcgccttctgcatcagaactctcaacttccagaccagataaaaccatctctcaaacaacaaagtctctttctttttttgtatcctctgtgttgtttatatgcactataagctttgtatgttctaaatatgtattgtagtgtcataacgaaatttttttgaatatttttatttattgtcttatagatgatgacgaatcggaatcatgtaatataattccacttttttttgtgttta

SEQ ID NO: 77 - DNA, 1642 bp, Arabidopsis thaliana
  source 1..1642: mol_type = genomic DNA
gcttcacgagacaaacgacgaacaacgcaattacgcgttcttatctttctgggtatttcttaattatattactctatataaataaaaatacccagaaacgtaatttcgtcgagttcaaaaattcaattcaaagaataatttctttccataaaaagattgttgtggattaacttctttcttaaaagaatctcatacccgtcgaatcttcttcttcaacctttttctgcgtttttaatattttccctacaaaaagattctcaaaatcgttttacataaacccgatcttgtcaatctccagaaacaaaaaaaaaaaaatggcgatcaagacaaagactagtctaattccaagttgttcatcacctgaggatctaaaacgcgttttgcaaacgctaggttcgagctggggagatgtagttgaagatctggagcgtcttgaggttgttccgttaaaaggagctatgactaacgaggtttatcagattaattggcctactttaaacggtgaagatgttcatcggaaagttcttgttcggatctacggtgacggcgttgaccttttctttaacagaggtgatgaaatcaaaacgtttgagtgtatgtctcatcatggttatggtcctaagcttcttggtcgtttctctgatggtcgtcttgaagaattcatacacgccagaactctttctgcagatgatcttcgtgtagcagaaacatctgatttcatcgctgcgaagctaagagagtttcataagcttgatatgcctggtccaaagaacgttcttctctgggaaagacttaggacttggcttaaggaggctaagaacttggcttcacctatagagatggataagtatcggttggaaggtttggaaaatgaaatcaatttgttggaagagagacttactcgggatgatcaagagattggtttctgtcacaacgatcttcagtatggaaatgtcatgattgatgaagtaaccaatgccattaccatcatagactatgagtattcgagtttcaacccaattgcttatgacattgcaaaccacttttgtgagatggctgctaattaccattcagacactcctcatgttctggactacactctatatccaggagaaggagaaaggagaaggttcattagcacatatcttggctctacagggaatgcaacaagtgataaagaagtagagaggttattgaaagatgcagagagctacactttagcaaaccatatcttctggggactatggggaatcatctcgggacatgtgaacaagattgagttcgattacatggaatatgcaaggcagagatttgaacagtactggcttagaaagcctttgcttcttgaaggatgaagcagattcgcattgaaaagccgatatacaactaaaagtttctgcaattaggtcaaaagaaaaaaagaaaatttagtagactatatgttgctattgttactctcatcagtttgtgtgtttcttcccttctatatagaggtttgttaactctcaaaacagttaaattgagtaaaacttgttctaaacaaagtattatatgataatagaagaagcaccagtggtctagtggcatgatagtaccctgccacggtacagacccgggttcaattcccggctggtgcaattta

SEQ ID NO: 78 - DNA, 1043 bp, Arabidopsis thaliana
  source 1..1043: mol_type = genomic DNA
agtttcaaattagtaaacgataaagtagatgataattaaattcatgtcatagccatgaacgaatgttatgttaaaaaaatttcatgtaagtaaattctttggagttcgattcttcttttgtccttacacaatcaaagatttttctttcaactttttttacttaacagcattaactctttctcagatcttcaattgttttcctaaacgaaattatcattaaattgtttaaaaaatacacatttaatataacatatatcataacaagatatattatatttatgaaaaagagatgtagtactacagcatatggtggcaaacaaacccactaaattcagtaaaatggaacccaccaaatttatctataaataagtccccaaacctctcccccaaaaatgcaacaacactcatctttcccaatataagtttttaccaaacaacaacttttgttttgcctttcctcaaaacataattttgtcttattttctaaaccggtaaaagatgtcgctagctatcgcagaagtttacacggtgaggaagtttcacagagagagtatgaagaaaccggccaaacagacggttaccggcgagggagatgaaaagattggcggaggaagtttcaaggaggcgccggtgaagtcaggtgggtgtagaagattcggacggtggttttttgggaagccgggaatgaagaaaagctctgctaaagtttcggatcccatggcgattgagtgatgaagaagaaattaaaacttttctcttctttgccttttttttttttctttctttattttgttttattttcattggtctttttttaatggctttttctagtgtcttctctttttctttattgggtgattttataaatagtcggtaaacattgtacaatatgaactacaaaaatatgagaaaatctatatatgtatgtagaatggatgtattccctaaataccacagctagtttgataagttttatgccaaaccaactaaacttgtatgccacgatatttcgtatttcagaaaatcgaaaattgttatttttt

SEQ ID NO: 79 - DNA, 1428 bp, Arabidopsis thaliana
  source 1..1428: mol_type = genomic DNA
acaaaaaccatttgaattttctttcttcttcaaaagttcgaaacttttttttttccggcaatggagggactagttccggtacagagacttccaattaaagtggcttcaccttctctgtatcggtgtaacaattctgtctcaatcagacgttcaatttcaggttttgccatggacaggaagataaactttagggctccgtcgcaattctcgatccgagctcaacagtcggatttgaaggaaagcttagctgtgtcttcttcatcagtagaggataaaggaaatgttcttagaatcaaggaatgggaagtagagatgtatcaggaggaattagctattagtcaaggtattaggataaggagaaaaccaccaagtaaggctcctttgggatactctggaccatttgagttgagattgcataacaatgatgctgattctcctcgtaatatcttggaggagatcacatggtacaaagacgtagaagtttcccggatgaaggagctaaatccgcttgacgtgctgaagaaagctgtagaggatgctcctcctactagggattttgttggggctcttaggatggctcataaaagaactggcttccctggcttgatagctgaggttaagaaggcttctccaagtagaggaatcttaaaagagaattttgacccggtcgagattgctcaagcttatgaaaaaggcggagcagcatgcctcagcgttttgacagaccagaagtatttccagggaggctttgaaaacttggaagcaataaggagcgctggtgtgaagtgtccactattatgcaaagagtttgttgtagatccatggcagatctactatgctcggactaaaggcgcagatgcagtactgcttattgctgctgtattggctgacctagaaataaccttcttgcttaagatttgcaagaagcttagcttggctgcccttgttgaggtacatgatgagagagagatgggtcgtgtacttggaatagaaggaatcgagcttgttggcatcaataaccgaagtcttgaaacatttgaagtggacatcagtaatacaaagaagcttcttgaaggagagcatggtagacaaatccgtgagagagacatgattgtggttggcgaatctggtctgtttacaccagatgacattgcctatgtacaagcagccggagtcaaagcagttttggttggagaatccattgtgaagcagaacgaccctgagaaaggaatagctggactttttggcaggaacatttctcatacttagagaccatatcataatacatctccaaatacgtttcctagtacatttgttttgtatcttgctctgtgagtattgaggaaagactagaaaggtttgttggttctgatgtttaagacattttcaaaaaaccatcgaataaactgaatcgaaatcgatttacag

SEQ ID NO: 80 - DNA, 1388 bp, Arabidopsis thaliana
  source 1..1388: mol_type = genomic DNA
agataagagcgaaacaaattacaaaattgaattacacaataatgtcctctaagcgacgactaccggtgaaatattttataagaaaacaaaaacaataattaacaaacaaaggcgacacctttagattcgacaagacgaccattttagaaaaagcttctcaaattctctccttatccccaaaaattcaaacttttttctctttggaaaattctgaggcaaaaatgcggcgtaattgctgccatgtttcatttgcttcaaccctcaagatccttaattttgtccaagctttcattggtgtttcgatcattatctactccatatggatgctccatgaatacagccgtcaccttcccgtggacccgcctccgtcagcttcatcaagctccggaaccgagatcgctactagtgtatctgagcccttgaagaatcctattgattttgtggcgagtatcattctcgggtctaatggtggtgatcatgggtttaacctacgctcgttggaccttcctgctccatggttcatctactctttcatggcggttggtatattggtctgcattgttaccttcattggtttcatagcagctgaagcaatcaatggctgttgcttgtgtttttactctattctcaaaactctgctcattctacttgaagctgcacttgttgcatacatcgctattgaccgtcactgggaaaaggatcttccgtatgatccaactggagaacttagtagtcttagggctttcattgaagaaaacatcgatatatgcaaatgggtggggattgctgtggtagcagtccagctactgtcattgctactagccatggttctcagagcgatggtttcaaccccgaaacccgaacttgacgaagaggaagatgatgagaacccaaggagtagaacttgggacccacttcttggtccgcaaggaaaccaagcgcctgctggctcaagcaagattgaaaactggagctcccgaatcagagaaaagtatggtttgaaccagagtccaccggtgaacccgaaaggttgatgaagccaaataatcatgtttctaaaactgcatgtgtccatatggtctctgtgaagctctctttctctatgttttgctctttgcaacttctcgagtgtgcataaacatttactcaaaacagtgctgtattgtgtttacacaaacggcataagcatcttcgtttgtgtgtttgcttgtacaaacaatcctgtgaacagtttgaagttagcatttccactataacgtttcgattcaatttataatgaagaaaacaaaactaaaaattgaattggacatcataaacagattaatgtaaaatgtatatgtaggttaaactctttcttagattatatcatctatatatgtttcattatt

SEQ ID NO: 81 - DNA, 1145 bp, Arabidopsis thaliana
  source 1..1145: mol_type = genomic DNA
gactccattattatccctctctctacaaaaaaaacagtagagagagatatagagagcatcaatggcgtcgtcgtcaagactttgcgattcgtgcaaatcgacggcagcaactctattctgccgcgcagacgccgcgtttctctgcggcgactgcgacggtaagatccacacagctaacaaactcgcatcacgtcacgaacgagtttggctatgtgaagtatgcgaacaagcaccagcacacgtcacgtgcaaagctgacgccgctgcgttatgcgtcacgtgcgaccgtgatatccactcagctaatccactctctcgccgccacgagcgcgtaccaatcactcctttctacgacgctgtaggtccagcaaaatccgcttcctcctccgtcaatttcgtagatgaagatggcggtgacgtcactgcttcgtggcttttagctaaagaaggaatcgaaatcactaatttgttctccgatcttgattatccgaagattgaggtaacgtcggaggagaatagctccggtaacgacggagttgttcctgtgcagaataagttgtttcttaacgaagattacttcaatttcgatctctctgcttccaaaatttctcaacaaggattcaatttcatcaaccaaactgtttcgacgagaacgatagatgtaccgttggtgcctgaaagtggaggagtgacggcggagatgacgaacacggagacgccagctgtgcagttatcaccggcggagagggaagcaagggttttgaggtatagagagaagaggaagaatcggaaatttgagaagacgattaggtatgcgtcgcgtaaagcttacgctgagatgaggccgagaatcaaaggacgttttgctaagagaacagattcgagagagaatgatggtggagacgtcggagtttatggcggattcggtgttgttccgagtttctgatattttccggtgaaagaaacatggtagtagtatatcggttaatagcagattaaggataattaaaactaaaatgtttcctgatttaatcaggggctaagttattgttagaagattgttgttttttgaattaattctcacaattgtatcctaaattatatagtttacttaatgttgaactaataaattttgatttacaatc

SEQ ID NO: 82 - DNA, 2268 bp, Arabidopsis thaliana
  source 1..2268: mol_type = genomic DNA
atggcggaatcaagctctcctctccctcctctttgtgaaaggatctcacacaaaagctatttcttaagagctgtggatctcactattctaggtcttctcctttctcttctattgtaccgtatcctacatgtgaaccaaaaggacaccgtttggatcgtggctttcctctgtgaaacttgtttcaccttcgtatggttgcttattaccaacataaaatggagtcctgctgattataaaacatatcctgaaagacttgatgaaagggttcatgaacttccaccggtagatatgttcgtgaccacagctgatccagtaagggagccaccgcttatcgttgtaaacacagtgctttcactgttagctgtgaattatccggcgaacaaactagcttgttatgtgtcggacgatggatgttcacctctcacttacttctctctcaaggaagcttctaagtttgccaagatttgggttcctttctgcaagaaatacaacgttagagttagagctccttttatgtacttcagaaactctccggaagcagcagaaggttctgaattcagtaaagactgggaaatgactaagagggagtacgagaagttaagccagaaagtagaagatgccactggaagttcccactggttggatgcagaagatgactttgaagctttcttaaacacaaaatcaaatgatcattcaactatagttaaggtggtatgggaaaacaagggaggtgtgggagacgaaaaagaggtccctcatgttgtttacatttcaagagagaaaagaccaaatcactttcatcattacaaagctggagccatgaactttctggtaagagtgtcagggttgatgacaaatgcaccatacatgttgaacgtagactgcgacatgtatgtcaatgaagcagatgtggtgcgacaagcaatgtgtatatttctgcaaaaatcaatggattcaaaccattgtgcttttgttcaataccctcaagatttctatgattctaatgtcggtgaactcaccgtcttacaattatacttgggacgaggaattgcgggaatccaaggacctcagtatgcgggttcaggatgcttccatactagaagagttatgtacggtctttctctagacgatttaggagacgatggaagtctttcttcaattgctacaaggaagtatttagctgaggagagtctaacgagagaatttgggaattctaaggagatggtgaaatcggtggtcgatgcgttacaaagaaaaccatttccccaaaaaaaccttaaggactctctagaaacggctcaagaaatgggacattgtcactacgagtaccaaaccagctggggaaaaaacatcggttggttatacgattcaacaacggaagatgtgaacacgagtatcggaattcattcgagagggtggactagctcatatatttttccggatccaccggcgtttcttgggtgtatgccacaaggaggaccggaggtaatggttcagcagcgacgatgggccacgggactgctcgaaatccttttcaacaaacaaagtccgttgatcggaatgttttgtcggaaaataagatttcgacaaagcttggcttatttatacgttttcagttggggtctaagatcaatccctgagctcttttactgtctcctgcctgcttattgcctactccacaactctgctttatttcccaagggagtttacttaggtataatcatcacacttgtggggatacattgtctttacactttatgggaattcatgaaccttggtttttccatacaatcgtggtatgtcactcaatcatttgggaggataaaaacaacttgtagttggttatttagcgtccttgatgtcatactcaagcttcttggaatatcgaaaaccgtcttcatagtcactaaaaagactatgcctgagaccaagtcagggtctggatccaaaaaatctcaacgagaagttgattgtccaaaccaagattccggtaaatttgaatttgatggctcgctttatttcttgccgggcacattcattgtgttagtgaatctagccgctctagccggttgtttggtgggtctacaaagtcgcggaggaggtggttcgggtttggcagaagcctgtggctgtattttggtggttattttgttccttccatttctaaagggtatgtttgagaagggaaaatatggtatcccattttctactctttctaaagctgcctttttagcagcgttatttgttgttttatctgtgggaaactag

SEQ ID NO: 83 - DNA, 1381 bp, Arabidopsis thaliana
  source 1..1381: mol_type = genomic DNA
catatttatactactagtatataagttaagggtttaagcctcttctcttccttctttctcttagccatcacatcgataatggcttctcttctaacaaaacccaaacccgttttcctctgttcaccatcgttatctccaagaactttgaacacagcaacaccgtcattgaatttcaccagaatttcattcacccatcaccaaaagcttgctcctttcaagcctcctagtctcgttgttgcattctctgaaaagggtttgaagagagatgtcaccacagctgctgcagcgacggagggagattacagaaggataatgttatctgatgtgttggtgaagaagaaggaaaaagtagtttggtgggagagagaatggaaagctatggactttggagctgttgctgtcgttttgtctatgcatttgcttagtcttttggctccgtttcaattcaattggagagctgtttcggttgcttttgggctttatatcgttacaggtcttctggggattactctgtctttccataggaatctttctcataaagccttcaagctacctaaatggcttgagtacttgtttgcttattgtggagctcaagctcttcagggaaacccaattgattgggtgagtacacataggtaccatcatcagttttgtgattcagacagagaccctcatagcccacttgatgggttttggttcagtcacatgaattggatgtttgataccaatacaatcacccaaaggtgtggagagcctaataatgttggggacttggagaagcagccattctatcgattccttcgaaccacctacattttgcatccgctggctctagcggttgctttatacgcaatgggtggctttccattcatcgtttggggaatgggtgtaagaatagtatgggtatatcatataacttggctagtgaactcagcttgtcatgtatggggaaaacaagcatggaacacaggcgatttgtctaagaacaactggtgggtagcagctctagcattcggggaaggatggcacaacaatcaccatgcttttgagttctcagctcgacacggcttagaatggtggcaacttgatatgacttggtacgtcgttaagttccttcaagccatcggtttagcaactgatgtcaagctcccatcggaagctcagaaacaaagaatggcattcaccagcgactgatcttaaaaaactacatggttatgcctaaagtcaaaactgtcggttcgattgaagctatgaaggttttaaaaaaggattttgttctgcttttttgtgtttacttaaaggtatatatctgtgcaagagattgtatgtgacaaactgattatgaataatatctataattacattcaatacaaaaggaagc

SEQ ID NO: 84 - DNA, 980 bp, Arabidopsis thaliana
  source 1..980: mol_type = genomic DNA
aaatcactcaccacataaagtaaaagtctcatctcttcataaaatagctttaaaccaatcaagtagagtttcttctcaagtctttttattttatttttatcaatggcttcttcagcagtgtctctccaatccatctctatgacaactctcaacaatctttcatgtaatcaacaatttcatcgaagctctcttcttggttcctctaaatccttccaaaatcttggtatctcatctaacggttcagatttctcctatccatcaagtttcactgccaagaagaacctcactgcttctcgagctctctcccaaaacgggaatatcgaaaaccctagaccaagcaaagttcaagaactgagtgtgtacgaaatcaacgaattagatcgacacagccccaagattcttaaaaacgcattcagcttaatgttcggtctcggagatctcgtaccattcacaaacaaactctacacaggcgatctcaagaaacgcgtgggcatcacggcaggtctctgcgtcgtcatcgaacacgtcccagagaagaaaggtgaaagattcgaagctacttatagcttctacttcggagactatggccacttgtccgttcaaggaccatacttgacttacgaggattcgttcctcgccatcactggtggtgctggaatctttgaaggtgcctacggacaggtcaagcttcaacagcttgtgtatccgacaaaactgttctacactttttaccttaaagggttggctaatgatttgccgttggagctcaccggaacaccggtaccgccgtctaaggacatagagccggcgccggaagctaaggcactggagcctagcggagttataagtaactataccaactaattcatgaaattaaaatgtttctcgtatcgctgtgtaatgatataaagatttgtagttttgtgctcttatctgtaataaaatcattgaggaataatatctcgagtatgttttaagtc

SEQ ID NO: 85 - DNA, 2706 bp, Arabidopsis thaliana
  source 1..2706: mol_type = genomic DNA
ccggttacagctacaccgccgttttctctctccgccgtcttttctcttcttctccgactgaatctgtgaaggtgaatttcggagttgagaaagagagattagcgtgtaatggcgatcgataatggcaagcttcaagaagaagaagcctcatctgttactcgattctataacattattttgggttgggactataaacagcttactaaagagaatgagaggaaaaatagaaaggattctaaagagaaattgaatgttgtaaagaatacttataaagatgttgatgattatttcgagacttttgaaccattgctcttcgaggaagttaaagctcaaattttgcagaataaagatggtgaagaagcatcggtgtgtaaaatgagattggtaatggagtgcaacgagggcgaagggtttcactttctgttagtcacatacgaacatgaggaggatgaatatcttgctcaaaatgatcttttattgctatcaaaagaagaggttaaagggaattcatttccttcatcttatgggtttgctgtagtggaacatcgtcaaaataatcttcttcgtcttcggatgtatttagctgaagacattgtgcagataaccaagaatactaaatcctctagaacaaagtcatttatccaagcgctttcaaatatgcgttctcttattacatcatctgccagccctattgacaaaagggtattcagtttaaagttatgtggtttatcaaccattattcgggaatatatagcactacgatcagttagttcgctccctttcaaggatttaatcttcactgcagcagaaaaatcttgtggttttggagatgaagcatggaaaatatctggacctctgaatgaattctttaacgaaaaccttaacaaatcccaaaaggaggcaattgatgttggtctatcaagaaaatccttcgtcttaatacagggtcctccaggtaccgggaaaactcagacgattcttagcatacttggtgctattatgcatgctactcccgcaagagtccagtctaagggtacagatcatgaagtaaagcgtggtattcagatgactatccaggaaaaatacaatcactggggaagagcctctccttggattttgggtgtcaaccctcgagatgctattatgcctgaagatggtgacgatgggttctttccaacctcaggaaatgaattgaaaccggaggtggttaatgcgagtcggaagtacagattacgtgtacttgtctgtgctccatcaaactctgcacttgatgagattgtgttgcggcttctgagttcgggtcttcgtgacgaaaacgcccagacatatacacccaaaatagtacgaattggtctcaaggctcatcactctgttgcgtcagtatcactggatcaccttgtggcacaaaagcgtggctctgccatcgataagccaaaacaagggactacaggaactgatatagatagtatccgcactgcaattttggaagaggctgcgattgtgttcgctacccttagcttcagtggctctgcacttcttgctaaatctaaccgtggtttcgatgtcgttataatagatgaagctgcgcaagctgttgagccagcaactcttatccctttggccactaggtgcaaacaagtatttctggtaggggatccaaagcaactcccagctactgtaatctcaactgttgctcaggattctgggtacggtacaagcatgttcgagagacttcaaaaggctggctatccagtaaaaatgttgaagacccaataccggatgcatccagagataagaagctttccgtcaaagcaattctatgaaggggcactagaagatggatctgacattgaagctcagactactcgtgactggcataaataccggtgctttggtccattttgcttttttgatatacatgaagggaaagagtctcaacatccaggagcaactggttctcgggtaaatctagacgaggtggaatttgttcttctcatctaccacagacttgtaaccatgtacccggagctgaagtctagttctcagctagctattatatcaccgtataactaccaagtaaaaactttcaaagatcggtttaaggagatgtttggtacagaggcagaaaaagtggttgatatcaacactgttgatgggttccagggaagggagaaggatgttgcaatattttcatgcgtcagagctaacgaaaatggacaaatcggttttctctctaattctcggcggatgaatgtggggattacacgagccaagtcttcagtattggtcgttggttcagctgcaacattgaagagcgatccactttggaaaaaccttatcgaaagtgctgagcaaagaaaccgattattcaaggtttcaaagccattgaacaatttcttcagcgaagagaatctggagacgatgaaactgacagaggacatggagattcctgatgcaccgttgtatgaagacgaatctcttccggtggcaccatatggtggagatgatgactttggagatggtgatgctgatcaagacgatgtagccatggccggagaagactaaactctaaaaaccttttcgttattagttagaactttgatattacaggaagtggttgaacatctaacaatatctacacttattatttgtatggttttattttggtttacatacagtaataagaatgtctttacttgtgctacg

SEQ ID NO: 86 - DNA, 1543 bp, Arabidopsis thaliana
  source 1..1543: mol_type = genomic DNA
ctctttctttgtgggttctagtttgtgtgtatatatactatatgcacatacacataggaagatatgatgggttacgagcagatgaatcagatgacaatgacgacaacagcgatgatgaagaattacaataagaagggactaatcaatactccacagaagaaaatgacgaggagaagtgtgtcggctattgatggtggtgcagctgcgacggctaaagaaggagatcgccgtcagaatatcaagactcttgatcttagcggcatgtccttggcttctctctctgcctcttctatcaacttagcttcaatctccaaactcgatctctccaacaacaatattcagaaaattccggaatctctagtagcgagaatgttaaatttgtgggcattggatttgcaatccaatcagctaaaaactcttccaaactccattggatgtctttccaaacttaagtttcttaatgtctccggaaattatctccaatctctccccaaaactatagaagattgcagatcgctggaagagctgaacgccaacttcaacgagcttacaaggctcccagacgcgatagggtttgagctaacgaatctgacgaagctctccgtcaactcaaacaagcttgttctcttgccaaactccgttagctacttgacgtcgctgcgtgtgctcgacgcgcggctaaaccgccttagttccctccctgaggatcttgagaacctcgtgaaccttcaggtcctcaacgttagccagaacttccagcacttgacgacgttaccttactccgttgggttgttgatatctctcgtggagcttgatgttagttataacggaattacggttttaccagactccctcggctgtcttcgccggattcagaagctatccgtggagggtaatcccctcatttccccaccatttgaagtggtggaacaggggttggaagcattgaagcagtatatgagcgagaagatgaccgagtcttataagaaaactccgaccaagaaaaagtcttggggcattggtaagctcgtaaagtacggcctgagctcttctccggggaggagtaccggccgtgaagacgggaaggaaggcttcatcaatgtatctgattaccgccaaatcgacggaatcgcctcaccgcgacatgtgtccctcttcaacccgcgacgcctcttgtctccactctccgcgtatttctctcctcctaggtattagcttatttaggtgtgttgtctgtctttttttttttcatcttctacatacgattccataccgttttcactgttacatccatgtagtgttaaattgttaatgttcttttacgttgttttctgcatgcttggtgtgaggataaaatttaattaaattgtgtatacgtttttttttccctgtctcatagaatttttctatggcttttctcatttcgttgtattgtagttcaattttgttgaacacatttgtaaactattacatagacacttaatattttactatgtatataatgtaaaatcgcatttttgaaagtactccaccatccttctca

SEQ ID NO: 87 - DNA, 1543 bp, Arabidopsis thaliana; identical to SEQ ID NO: 86
  source 1..1543: mol_type = genomic DNA

SEQ ID NO: 88 - DNA, 3675 bp, Arabidopsis thaliana
  source 1..3675: mol_type = genomic DNA
ctttcactcttcccttctctctccccaaaataaatcagaaacctatcaacattcttcaacagccacaagtaaaatttatagacatttctgtctgaagaagaaaaagattgaatttttttgcttgttgtgggttctttaatggatccaagaacaagacttgactatgctctgtttcagctcacaccaactagaacaagatgtgatcttgtgatattctctggtggtgagaatgagaaacttgcttctgggatttttcaacctttcgttacgcatctcaagagcgttagtgatcagatttctaaaggtggatactccgttactctccgtccttcctccgttggtgttccttggtttactaaagtgacccttcagagatttgtgcgatttgtgactactccggaggttcttgagaggtctgtaacattagagaaggagattgagcagatcgaggattcgattcaagctaatgcagccgccattgccggtgaagctgaaggaaacgagttgggtggtacatggacttctcaaaagtctacggctttatcaaagacgaaaggggaaactgatggagacactgtggaagaaaattcgaaggttggtcttcagcgtgttctggagaaccgtaaagcggctttgtgcaaagagcaagcgatggcttatgctcgagctttggttgttgggtttgaacttgactacatggatgacctcttttcgtttgctgatgctttcggagcttcgcggttaagggaagcgtgtgttaactttgtggacttgtgcaagagaaagaacgaggatagaatgtgggtggaccaaatcactgctatgcaagcatttcctaggcctgaattaacgttcatgggtgactctgggatcgtactcgctggtgaagagaatgatttgttgaatgctacaaacgtaaagcatggaaactctatggatgcctcgagccagggtagctttgagactggccaagaagggagagctcaaatggcaatgccgtggccaaaccagtttcctcagtacatgcagaactttcaaggacatgggtatccgcctccttatatgtttccggggatgcaaggtcaatcaccatatttccatgggaatatgcaatggcctgtaaacatgggagatgtggagtcaaatgagaagtcttccaagaagaaaaagaagaagaagaagaataagaagaagtcgaagcaagatgaatctgccgagccaagcgataattccagtactgagaccgaatcagaagacggaaatgaaggaaagaaacaatccaggaaagtggttatccgcaacataaattatataacttcaaagaggaatggagcgaaggagagtgattcagatgagtctggagaagaagaagggtttgtggatggagattctattaagcagcaagtagaagaagccattggctcagtggagagacgtcataaatcgacttcacaccgtcagaggaaacacaaaagtcacaacggtgatgatgattcaagtaacaaggaaactaaggggaatgataattgggatgccttccagaatcttcttttgaaagacaatgattcagagccagaagaattactacgtatatcatcaactgcgttaaatatggcgtctgaagttgtgagaaagagagaaccgccttctgatgattcattcttggttgcaattggaaatgaggattggggaagagaaaccagcattgagaaattcaatgcaggtgagaatgttcggataataaggaaagggaacaactatgacgaggagatgttgaatccgggtagaagcgatgaatcaagaagctattcgcaggcagagatgtcggttcatgatgggaagctcagaaccagaaatgaggcggaagaagactggttcatacgtaaccaagctggtccagaaacagatccaagtcttgtcaaaacatttgtaggagaccatttccacttaaataagagcagtgagagagatgtcctgaccgatgactctttcatgatccattctcgtgttgagaaccaagtagaagattctcggttaaggacagaaatcatggacttagacgtttacggaaccacccaacaagaaaacagtgccccggagaacactccgcatgaaccagatgacctatacatggttcttggacgggaacaagatgttaaacctacattgttaccatggacccctgaaattgactttgagactaacactttggctcaaagaacaagcagaatcgatttgataactgccacaaaggcctctgcaggtgaacaaaccttagatggtaaagaaaagaagagtcgtggtatctccaaggggaaggatgcaaagtcaagagcatcaagtagacctgacccggcgtcaaaagccaagagacctgcttggggaagtagagctgctgtctccaagtccaaatccgagatggaggaagagagaaagaagagaatggaggaacttttaattcagaggcaaaagagaattgcggagaagagttccggtggtagtgtatcaagttctttagcgtccaagaaaactcctactgtgaccaagtcagtgaagagctcgataaagaatgagaagactcctgaagccgcgcagtcaaaggctaagccagtactgagaagttccaccattgagcgccttgctgttgctcggaccgctccaaaggagccacagcaaaaaccagtaatcaaaagaacatcaaaaccttcaggatacaagacagagaaagctcaggaaaagaaatcgagtaaaataggtcaatcagatgcgaaaagtgtggaactttctcgtgacccgagtctcgaaatcaaggaaacggtggtggaagattcacattcttacttgtcagagaagcaagttgatgcacttcctgctgttgcttctgttgatgatttcaaagacattaaagaattgcatagcttgccatcagaagaaacggccagagtaaagaacagaccgaatgaaatcatagcagagaaagtacaagatcagacgaagatcgatgatcaggaaacagtgaagaatacatctgtttctgaagataagcaaatcaccacgaagcattactcagaggatgttggagaagtccaggcttcacaggaaaaaccggtgtctccaaagaagtcggtgactttttcagagacaaacatggaggagaagtattatttctcaccagcggtctcagagattgacatctcaacgccacctgctactgaagcagatcattcgaggaagaaatggaacagtgaagagacgtctcccaaggcaacggctaaagtcttcaggaagcttcttatgttcggaaggaaaaagtaaaaccgacgttggaattcttcttctccggcatcatcgaacctttgttttgagacgacgtcatgttgagttcagagaacaatatatggggatgtgttggaatcatgaatcgtaggttaaatcctacaagaggaaaagcttcaggagacagagaagatgaagagaagagaagaaaggaagaagaagaagaagtcgtgacaaagaaagtcagctaatagacatatctccgctatttaaagtcgagtctaagcctttatacacttaaaggttgagggttcgaacccttgttatgtctttttgccctaaaagaaaaaaactttctcatgaaattccgtgagatgattcttccattctaagcatttg

SEQ ID NO: 89 - DNA, 3675 bp, Arabidopsis thaliana; identical to SEQ ID NO: 88
  source 1..3675: mol_type = genomic DNA

SEQ ID NO: 90 - DNA, 3727 bp, Arabidopsis thaliana
  source 1..3727: mol_type = genomic DNA
atatccagataattaattctctcataatatcttctccacaatttcaactcttctaaagtctaaaccatgaagttactctcaaagacctttttgatattaactctcaccttcttcttctttggcattgcactagcgaaacagagctttgaaccagagatcgaagctttgaaatccttcaagaatggtatttccaacgaccctttaggagtattatcagattggaccatcatcggttcgttacgacactgtaattggaccggaatcacctgcgatagtaccggacatgtagtctcggtttccttgctggagaagcaacttgaaggtgttctgtctccagccatagcgaatctcacctatctccaggttcttgatctcacttcaaatagttttaccggcaaaataccggctgaaataggaaagttaaccgagcttaaccagcttattctgtacctaaactatttctctggttcgattccttctggaatctgggagcttaagaatattttctatcttgatcttagaaataatttgttgtccggtgatgttcctgaggaaatctgcaaaaccagttctttggtattgattgggtttgattacaacaacttaaccgggaaaataccagaatgcttaggagatttggttcatctccaaatgtttgtagcagctggtaaccatttaactggttcgattccggtatcaattggtactctggctaatttaacggatttagacctgagtggtaaccagttaaccggaaaaataccgagagattttggaaatctcttgaacttacagtctctcgttttaactgaaaacttgttggaaggagatataccagctgagatcggaaactgctcgagcttggtccaacttgagctttacgataaccagttaaccgggaaaataccagctgaattagggaatttggttcagctgcaagcactccggatatacaagaacaaacttacttcttcaattccatcttcattgttccggttaactcagttaacccatttggggttatcagaaaaccatttggttggaccgatatcagaagaaatcggttttcttgagtcacttgaagtcctcacacttcattccaacaacttcacaggagagtttccacagtccatcacaaacttgaggaacttgacagtcctaacggtggggttcaataatatttccggtgagctcccggcggatctagggcttcttacaaaccttcggaacctttcagcgcacgacaatcttcttaccggaccaataccttccagcataagtaactgcaccggtcttaaactcctggacctgtctcacaaccaaatgactggcgagatcccgcggggtttcggaaggatgaatcttacgttcatttctattgggaggaatcatttcaccggtgaaattccagatgatatcttcaactgttcaaacttggaaactcttagtgtggcagataacaacttaacaggaactctcaagccattaattgggaagcttcaaaaactcaggattttgcaagtttcatataactctctcactggaccgattcctcgagaaatcgggaatctgaaagatttgaatatcttgtaccttcactctaatggtttcacagggagaatcccgagagagatgtcgaatctcactctcctccaggggctaaggatgtattcaaatgatcttgaaggtccaattcctgaagaaatgtttgatatgaagctactctcagttcttgatctttccaacaacaaattctcaggtcaaattcctgccttgttctccaagcttgaatcgcttacctacttgagtcttcaaggaaacaaattcaacgggtctatccctgcaagccttaagtcgctttcgcttctcaacacattcgatatctccgacaatcttctcactggaaccatccctggagagctgttagcttctttgaaaaacatgcagctttacctcaacttctcaaacaacttgttgactggaaccatcccaaaggagcttggaaagcttgaaatggttcaagaaatcgacctttcaaacaatctcttttctgggtctattccaagatctttacaggcctgcaaaaatgtgttcacactggatttttcgcagaacaatctctcgggtcatataccagatgaagtcttccaaggcatggatatgatcataagcttgaacctttcaaggaacagtttctctggagaaatccctcagagcttcgggaacatgacgcatttggtctccttggatctctctagtaacaatctcactggtgaaattccagagagtctcgccaatctttcgactctgaaacatctcaaactagcttcaaacaacctcaaaggccatgttcctgaatccggggtgttcaaaaacatcaacgcctctgatctaatgggaaacacagatctctgtggtagcaagaagcctctcaagccatgtacgatcaagcagaagtcgagccacttctcgaagagaaccagagtcatcctgattattcttggatcagccgcggctcttcttcttgtcctgcttcttgttctgattctaacctgttgcaagaaaaaagaaaaaaagattgaaaattcatcagagtcctcattaccggatttggattcagctctgaaactgaagagatttgaaccaaaagagttggagcaagcaacagattcattcaacagtgccaacatcattggctcaagcagcttaagcacagtgtacaaaggtcagctagaagatgggacagtgattgcagtaaaagtattgaatctaaaggaattctctgcagaatcagacaagtggttctacacagaagctaaaacattgagccaactaaaacatcgaaacctggtgaagatcttagggtttgcgtgggaaagcggcaaaacgaaagctttagtgcttccatttatggagaatggaaacttggaggacaccattcacggctctgcagcaccgattgggtcgcttttagaaaaaatcgatctttgtgttcatatcgcaagcggaatcgattatcttcattctggatatggttttcccatcgttcattgtgatctgaagccagctaatatactccttgacagtgaccgcgttgctcacgtaagcgattttggaactgctcggattctaggtttccgcgaagatggaagcaccacagcttcaacatcagccttcgagggtacaattggatacttagctccagagtttgcttatatgaggaaagtgacaacaaaagccgatgtattcagcttcgggatcataatgatggagctgatgacgaaacagagaccaacttcgttgaatgatgaagattcacaagacatgactttgcgccaattggtggagaaatcgattggaaatggaagaaaagggatggttagggttcttgatatggaactcggggactctattgtttctctgaaacaggaagaggctattgaagactttctgaagctttgtttgttctgtacaagctctagacctgaagatcgacctgatatgaacgagattcttacacatctgatgaaacttagaggcaaagcgaattcatttcgagaagatcgtaacgaggatcgagaagtttagcagcaaagcttttttgatgacattttttcgactttgccaaactctgttacgaaggttgaatactttggacgtaaaacgttctgattttgcttttcgttatgtatttctgttttatataaggttgaaatttggttttgat

SEQ ID NO: 91 - DNA, 1177 bp, Arabidopsis thaliana
  source 1..1177: mol_type = genomic DNA
caaaacaaaacgccattttttgtcgattcttcgtcgtcctcctttgaaattcacaccaatttgtctctcttcctagagaaacaaaagattattcgaaactcgggaaagtatcatccggtcaccggaaaattgattatttccgatgccaataggtgaccgtcagaatccgagtgtggagaagaagaagaacctcttcaggctatgtccgttttggcagaggagaagcaccacttcttcatcttcaacacagaatccaaaccaaaactaccgtagccgccatggaaatcggaatacagatatttccgccgtctctaagcctccgttgactatgtcttccgtcgccagatcacttcttccagctcgccgtcgtctccgactagatccttctagttatctgtatttcccttatgaacctggaaaacaagttcgcagcgcaataaagcttaagaacactagcaaatctcatactgcatttaagttccaaacaacggcacctaagagttgttatatgcgtcctcccggaggtgttttggctccaggagagagtgtttttgctactgtgttcaagtttgtggaacatccagagaacaatgaaaagcagccgttgaatcagaagagcaaggttaagtttaagattatgagcctgaaagttaaaccaggagtagagtatgtgcctgagttgtttgatgagcaaaaggatcaagtagcagtggagcaggttcttcgggtcatttttattgatgcggaccgcccaagtgctgcattggagaaactgaaacgtcaattggatgaagctgaagctgcagttgaagcaagaaagaagcctcccccagagacagggcctcgagttgtcggggagggtcttgtcatagacgaatggaaggagagaagagagaagtaccttgctcggcaacaagtcgaatccgtagattctttgtcctaaacgcagagagcaatgtggacttgttctgcagatcatgtacataatttattatccctcgattatgtatttatctctagacgattactttgtggttcttgtatgtctctgtttgttgtgtgattcatgccggttttttctccttcatcaaattttgtttcggtcgtttttagttgatctagaatcgaaccagagtttgttcagtatttagttacaaatgaaaaatcctgttatacc

SEQ ID NO: 92 - DNA, 1115 bp, Arabidopsis thaliana
  source 1..1115: mol_type = genomic DNA
tactcacttttacaactaactcataagtaaaacacagacagtttttagatggctaagatatattccccttcttttcccggtactctctgtctttgcatttttactctcttgacgctaatgttcattcgggtttccgctcgacccgcgacattcgtcgaggatttcaaagccgcctggtcggaatctcacatccgtcaaatggaagacggaaaagctatccagctcgtccttgatcagagcactggatgtggatttgcttccaaaagaaaatatctattcggacgagtgagcatgaagatcaaactcattcccggagactctgccggtacggtcaccgctttctacatgaactccgatacggccacggtgagagacgagctagattttgagttcttgggaaacagaagtggtcaaccttactcagtgcaaacaaacatatttgctcatggcaaaggagatagagaacaaagagttaatctttggttcgacccatctatggattaccacacttacactatcttatggtcacacaaacacattgttttttacgtagacgatgtgccaataagagaatacaaaaacaacgaagccaagaacatagcttacccaacatcacaacctatgggagtatactcaacattatgggaagcagatgactgggcaacacgtggtggattagagaaaattgattggagcaaagctccattttatgcttattacaaagatttcgacatcgaaggttgtcctgttcctggaccaaccttttgtccatcgaaccctcataattggtgggaaggttatgcctatcagtctcttaacgccgttgaagctcgacgttaccggtgggttagagtaaaccatatggtttatgattattgtactgaccggtctaggtttcctgtcccaccacccgagtgtcgtgcttgaaaataattgcatacgtacgttgcaatgatcatgtttcgtcttgtacgagattttatatataaattgtgggaaaatgtggattgtattgtcctcttacgcaattgtgcagacgtacgtgagtgtgtatagatataattgtgatttgtggttatttgaaatttttataaacatagatgaattctgtgaag

SEQ ID NO: 93 - DNA, 1981 bp, Arabidopsis thaliana
  source 1..1981: mol_type = genomic DNA
actggtgtgcgcactaagcaagcatactctattatttgtcgaaatcacaagagccagccagtctctctgagttctatcacaatcttcttcttcagagcttattgagtaatggcggcttcaatgcagttctacggagttaaaacaccagaacttgccttaaactcaaaaaggattgagtttagctcaaaggggctcaacttctcagcactcgtgtcctctgctcgtgtattctctagaaacgtagatcgttcttgtaagaacatcgctctgagagttacttgtgaagcgggaagagtggagctgctagagagaaaagcctcagagactttcaagttaaacaaaactgagaaaaaattgacctgtgtaatgaaattcggtggctcatcagtggcatcagcagaaaggatgatacaagttgccaaactcatactcagcttcccagatgagaagcctgttgttgtgctatcagcaatggcaaagaccaccaataagcttttgatggctggggagaaggctgtttgctgcggtgtcaccaacgtcgacactatcgaagagttgagctatataaaggaactccatataaggactgctcatgagcttggagtggaaacagcagttattgcagaacatctagaaggactggaacagcttcttaaaggcgtcgcaatgatgaaggaattaactttacgctcaagagactacttggtttcatttggagaatgcatgtccactaggctatttgctgcgtacctgaacaaaattgggcacaaagcacgacagtatgatgcatttgagatcgggattatcaccacagatgacttcactaatgctgatattcttgaggcaacatacccggcggtttcgaaaaagttacttggtgactggagcaaggaaaatgcactccccgttgtcacaggcttccttggaaagggatggagatcttgtgctgtaactacgcttggtagaggaggtagcgatttgactgcaacaacgatcgggaaggctttaggtttgcgggagatccaggtttggaaagatgtggatggagttttgacttgtgatcctaacatttactgcggagctcaacctgttccacacttgacatttgatgaggctgctgaacttgcttactttggtgcccaggtgttgcatccactttccatgcgcccagcgcgagaaggtaacattcctgtaagggttaagaactcttacaatcccactgctccaggaactgtcatcaccagatcaagagacatgagcaaggctgtattgaccagcatcgttctgaaacgtaatgtcaccatgttggacatcactagcacccgtatgctcggccaatatggtttccttgccaaggtgttttccacatttgaaaagttgggcatatctgtggatgttgttgcaaccagcgaagttagcatttctttgacattggatccttcaaagttctgtagcagagagttaattcaacacgagcttgatcaggtggtggaggaacttgagaagattgctgttgtaaatctgcttcgacacagatcaattatctctctcatcggaaatgttcagagatcatcattcatattagagaagggcttccgagtacttcgaaccaatgggattaatgtccagatgatctcccaaggtgcatctaaggtaaacatctcactgatagtgaatgatgatgaggcggagcattgtgtgaaggctctccactcggccttctttgagacagacacttgtgaagcagtctcagaatgcccgaccggctacatcgctgcctcttcgtgaaacctctaggtgcaacctgcaaggtctgaaagtactagctagtttgatgttatgattcttgtcagactggtattaggaaacaaagctcccattctccttgtgtaatataatgtaatttgattgggagatgtactggaaaatcaataagttttcctatttgaatatatgattaggactgcctacaacatcagtt

SEQ ID NO: 94 - DNA, 3043 bp, Arabidopsis thaliana
  source 1..3043: mol_type = genomic DNA
atgagatctcttctctttgtactatcactcatttgcttttgctctcaaacagcactttcatggaagaaggaagagtttcgcagctgtgaccaaactccattttgtaaacgcgctcgatctcgtactcccggcgcgtgttctctaattgtcggcgatgtttccatcactgatggagatctcgtagcgaagcttctaccgaaagcgcctaatcaaggcgatggggatcagatcaagccgttgattctttctctctcagtttacaaggatgggatcgtgcggcttaaaatcgatgaggaccattcgttgaacccgccgaagaagaggttccaagttcctgatgtggtagtgtctgagtttgaggagaagaagatctggctgcagaaagtagcgacggagacgatctctggagacactagtccgtcttcagtagtttatgtatccgatggttacgaggcggtggtgcgacacgatccgtttgaggtgtatgtgcgtgagaaatcaggtgatcgccgtcgcgttgtgtcattgaattctcatggattatttgattttgagcagttggggaggaaaactgaaggagataactgggaagagaaatttaggactcatacagattctagaccatctggtcctcaatctattagtttcgatgtttcgttttatgattccagtttcgtttatggaattcctgaacacgccactagcttcgcgttgaagcctaccaagggtcctggagttgaggaatctgaaccctacaggctttttaatctagatgtgtttgaatacgatcatgaatcaccgtttgggctttacgggtcgattccgttcatggtttcgcatgggaagtctggtaaaacttcaggatttttctggttgaatgctgcggaaatgcagattgatgtgttggctaatggttgggatgcagagagtggtatttctttgccttctagtcacagtaggatcgacacattctggatgagcgaggcagggattgtggatacattctttttcgttgggcctgagccaaaggatgttgtaaagcagtatgcaagtgtgacaggtacttcagccatgcctcagttgtttgccactggttatcatcaatgtaggtggaactacaaagatgaggaggatgtggcacaggtggactcgaaattcgatgaacacgatattccttatgatgttctctggcttgacattgagcatacagatgggaagagatactttacatgggatagtgtgttgtttcctcatccagaggagatgcaaaagaaattggctgcaaagggtaggaagatggtgaccattgtggatcctcatatcaagagggatgactcatacttcttacacaaagaggctactcagatgggatactatgttaaggattcatctggaaaagactttgatggttggtgctggcctggttcatcatcttacattgatatgttgagcccagagattagaaaatggtggggtgggaggttctcgtataagaactatgttggttcaactccatcattgtacacctggaatgacatgaatgagccttctgtattcaatggtcccgaggttactatgccaagagatgcattacatgttgggggtgttgaacacagagaagttcataacgcatatggatattacttccacatggcgacttccgatggacttgttatgcgtgaagaaggaaaggataggccttttgtattgtcaagagcaatctttcccggcactcaaagatacggagcaatttggactggagataacacagccgaatgggaacaccttagagtctccattccaatgatattgacacttggtcttactggaattacattctctggagctgatattggtgggttttttggaaatcctgaaccagaacttctagttaggtggtaccaagtgggtgcttactatccatttttcaggggtcatgctcatcacgataccaaaagacgagagccttggttgtttggtgaacggaacacagaactcatgagagatgccatacacactcgttacacactgctcccatacttctacacgttgttcagagaagcaaacgttacgggtgttcctgttgtacgcccattatggatggaattcccgcaagatgaagctacttttagcaacgatgaagccttcatggtcggtagtggtctactggttcaaggagtttacaccaagggaacaacgcaagcttccgtgtatttgcctggcaaagaatcatggtatgacttgagaaacggtaagacttacgttggaggcaagactcacaagatggatgctccagaggagagtattcctgcgtttcaaaaggcaggaaccatcatcccaaggaaggaccggtttaggcgaagttcctctcaaatggacaatgatccttatactttggtggtagctttgaacagttctcaagaagcagaaggtgaactctacatcgatgacggcaaaagctttgaattcagacgaggctcttacatccatcgtcgcttcgtcttctcaaagggtgttcttacatcaacgaacttagctcctccagaagctcgtctctcttcccaatgcttgatcgacagaattatcctcttgggacacagctcaggtccaaaatctgcgttggtggaaccgttgaatcaaaaggcagagattgagatgggacctctgcgaatgggtgggcttgtagcttcctcgggtacaaaggtgttgactatccgcaaaccgggtgttcgagtggaccaagactggaccgtaaagattctgtgattgaacggtttgaaccagtttcactcatggccgttagagtggccgaaatctgcttttccggcgacggaatatcacactttttaatatatgtttggagatttagacttaaatagttgtaagagctaacagtttgaaagtcactttgcattgttgtttatcttcatataaatgagtttagattttgataatttcagaattcgtggaatcataattaacaattttgatagggaaaaataatttgttttttttagtcagagggtcaaataatcttaccttc

SEQ ID NO: 95 - DNA, 787 bp, Arabidopsis thaliana
  source 1..787: mol_type = genomic DNA
attttttctagggtttcctcttccgcattcgtcgtcttcagctcctcctacacagtttcttctctgaatctacttaggaagctaaaatgggtagatgtccgactagaaaagtgaagaagaggagattatctcacaaaacagctcgccgtgacaaattcgaagtcaaaggcgatgacttggtttacacagagttgcgtaaaccggagacggagattaagccgttacagcttgacgaggatttgcctggaatgggtcaattctactgcttacactgcgatcgatacttctccaacgtatcagtgagggatgatcatttcaagactaagaaacacaagaagcgtgtgaatatgatgatgggacaagcgccacactcgcaactcgatgcagatttagccgggggaatggggatgccggacaatggcccaaagctgatgtctaatttggtattcacagagttgcgtaaaccagagacggaggatttacctggaatgggtcaattcaactgcttactctgccatcggaacttctccaatgcatcagtgatggattatcatttcaagactaagaaacacaaaaagcgtgtgaagaagatagagcgaccagcgccacactcgcaactcgatgcagatttagctggtggaatgggaatgccagacaatggtccaaagctgatgtctgcctgagtttttacagttattttccttatttagttaatggaacccgaaattttgttgtaaaactataatctcctaaattaatgatacaggttttttgtctgttgccaagt

SEQ ID NO: 96 - DNA, 1397 bp, Arabidopsis thaliana
  source 1..1397: mol_type = genomic DNA
aaaataatggcttcgcccgggttcgaaccggagaccttcagtgtgttagactgacgtgataaccaactacaccacgaaacctacatgcttctttctaacctcaacaatatatatatacatatagataactgtttaatattgtaacttgtaaccagtgtcggctaatttcgacttttgtagatctttttctgctctttctctctctctctctctctctctctctctctctctctctcttgtattatttctatctcccccgccgtcgaaagagaaacgtcgatcggagaacctttgaaatgtcgactggattagatatgtctctcgacgacatgatcgccaagaaccgtaagtctcgtggtggagccggccccgctcgtggaaccggatccggatccggaccgggtccgactcgccgcaacaaccctaatcggaaatcaacccgatctgctccataccaatcagccaaggcgccggagtccacctggggtcacgacatgttctccgatagatctgaagatcaccgatcgggacgttcctccgccggaatcgaaactggaaccaagctctacatttccaatttggattacggtgtcatgaacgaagacatcaaggaactgtttgctgaagttggagaacttaaacgctacacagttcattttgatagaagtggaagatcaaagggaactgctgaagtagtgtattctcggcgtggcgatgcactcgcagctgtgaagaagtataatgatgttcagctggatggaaaacccatgaagatagagattgtgggcactaatcttcaaactgctgcagccccgtctggtagacctgcgaatggaaactccaatggtgctccatggagcagaggaggacaagggagaggaggtcaacaacgaggtggtggacgaggaggcggtggccgaggtggtggtggtcgtggtaggcgtcctggtaagggccctgcagagaagatttctgcggaagatcttgatgcggatcttgataagtaccattctggagatatggagacaaactaaggaacgtgactgatcttctcaaaccggtaggggttttaggaggaagagaatcgagaaaatgtttgccagaggctttaccacttagcgcctttttggctgtgttgttcatttgtttcattagaatgactttacagaattgagaatatgtgttatttaaagttgttgtctatcttaataccctcaagtgaaaggcagaggaaggaataccaatttcgtttacagatcatatgcaggcaaaagagttttcagaaatcaggtttagttacttgtattgtgtctcttatccaagccatgccttgtggtattatgagcgcagaattttgattgaatattgttcatttgcattaaagtatcaaaccattt

SEQ ID NO: 97 - DNA, 636 bp, Arabidopsis thaliana
  source 1..636: mol_type = genomic DNA
aaaactcctccgtaaaaccctttcatttgcatttgggaatcgattgctcttcttcgtagtcgcctttgaattcgcagagtgagaagcaatgaaggtgagatcatctgtgaagaagatgtgtgagttttgtaaaacagtgaaacgtcgtggacgtgtgtatgttatatgctcttccaatcctaagcacaagcaaagacaagggttcagttcctttgcttatgaaggaattacaccttcccctttgtttgctgagccgattgctagtcaggagttggtgaggctgcctggtcagggggtatcagccggactggcatcacttttacacaaaaggcctatgccaacagcgtatttcggatggaggtctggtcttgcatccattctcttcaaacaaggaaattaggatgtcagcatttccctttttattcttcagatttgtaatcgcagttttcttccaattcctatgaaacattattgtatatctctccacttttactttggtcagtcgtatgctccttcgagacctgtttgattgtgcctcgcatgacctgaacaaagagatatattatgacactcgagtatttgtttttacattttccactggagcatatgttagggatcaatatgtttttcttttag

SEQ ID NO: 98 - DNA, 666 bp, Arabidopsis thaliana
  source 1..666: mol_type = genomic DNA
tgctcttcttcgtagtcgcctttgaattcgcagttagagatggatgcttcagattcgttttacttttgcttccatcatcggatcaactaaggattgcagtttttctgagtgagaagcaatgaaggtgagatcatctgtgaagaagatgtgtgagttttgtaaaacagtgaaacgtcgtggacgtgtgtatgttatatgctcttccaatcctaagcacaagcaaagacaagggttcagttcctttgcttatgaaggaattacaccttcccctttgtttgctgagccgattgctagtcaggagttggtgaggctgcctggtcagggggtatcagccggactggcatcacttttacacaaaaggcctatgccaacagcgtatttcggatggaggtctggtcttgcatccattctcttcaaacaaggaaattaggatgtcagcatttccctttttattcttcagatttgtaatcgcagttttcttccaattcctatgaaacattattgtatatctctccacttttactttggtcagtcgtatgctccttcgagacctgtttgattgtgcctcgcatgacctgaacaaagagatatattatgacactcgagtatttgtttttacattttccactggagcatatgttagggatcaatatgtttttcttttag

SEQ ID NO: 99 - DNA, 1991 bp, Arabidopsis thaliana
  source 1..1991: mol_type = genomic DNA
attccttgcttcatttttcgtcaccctagccgctttactctcttgcgatatctctgaggtaattctggagcagcataaacaatcaattgattcattcttcttgataccaagttgtggaaactctaggattgtttgctgtatatctccagaattgctgttttgattgaatttaggtcgcttagctcagttgatagagcaccacattttttgtggtagaaatcgatttgtttgacagtctctaaccatgggtaaagagaagtttcacatcaacattgtggtcattggccacgtcgattctggaaagtcgaccaccactggacacttgatctacaagttgggtggtattgacaagcgtgtcattgagaggttcgagaaggaggctgctgagatgaacaagaggtccttcaagtacgcatgggttttggacaaacttaaggctgagcgtgagcgtggtatcaccattgacattgctctctggaagttcgagaccaccaagtactactgcactgtcattgatgctcctggccatcgtgatttcatcaagaacatgatcactggtacctcccaggctgattgtgctgtccttatcattgactccaccactggtggttttgaggctggtatctccaaggatggtcagacccgtgagcacgctctacttgctttcacccttggtgtcaagcagatgatctgctgttgtaacaagatggatgccactacccccaagtactccaaggccaggtacgatgaaatcatcaaggaggtgtcttcctacttgaagaaggttggttacaaccccgacaaaatcccatttgtgcccatctctggatttgagggtgacaacatgattgagaggtccaccaaccttgactggtacaagggaccaactctccttgaggctcttgaccagatcaacgagcccaagaggccgtcagacaagccccttcgtctcccacttcaggatgtctacaagattggtggtattggaacggtgccagtgggacgtgttgagactggtatgatcaagcctggtatggttgtgacctttgctcccacaggattgaccactgaggtcaagtctgttgagatgcaccacgagtctcttcttgaggcacttccaggtgacaacgttgggttcaatgttaagaatgttgctgtcaaggatcttaagagagggtacgtcgcatccaactccaaggatgaccctgccaagggtgctgctaacttcacctcccaggtcatcatcatgaaccaccctggtcagattggtaacggttacgccccagtcctggattgccacacctctcacattgcagtcaagttctctgagatcttgaccaagattgacaggcgttctggtaaggagattgagaaggagcctaaattcttgaagaatggtgatgctggtatggtgaagatgactccaaccaagcccatggttgtggagaccttctctgagtacccaccacttggacgtttcgctgtgagggacatgaggcagactgttgcagtcggtgttatcaagagtgttgacaagaaggacccaactggagccaaggttaccaaggctgcagtcaagaagggtgccaagtgaactctgaacatcaaaactctttccgctgatgaaatgaaggactattttagtttctttactttagtagtttggtatttggttggttgtttgtgttaccgcttcgtttattctccgtcggagctcaattctcggaattgggttcttgatcggaggtggcggaggtacttggcactcgagcttcctgtttatttcttttgttttgtgttatgattttgaacctttttggatattcggttatatgatatttgtgtcattcctgcggatattatcttatcttatcaacttaagtctgtttttcttctctaaaattcaacgatcagcctctgaagtttcttacatggtaaaattgtaatctagaactttaaacaacattggagaaacaagtctatatcagttt

SEQ ID NO: 100 - DNA, 1408 bp, Arabidopsis thaliana
  source 1..1408: mol_type = genomic DNA
tcatgatccttaatcttagctcctagggtttctgtgaattagtctaattttacaattttatgcctttgaggatatatcttaatgtgaaagttttaaacttgtaactcaaaaaccatttgttagttagtaatcatcatcattctgaattgagctttgtttgaatttgagtagggcaacgaaagattcaagttagttgcggtggtaagagtgaggtgttgaagagtgatacaatggaacctcatgaagcagaaacgtttgtgaacaagagaaccctttatgctcccattgagccatatagcagtggaaatttaaaggtttcagatgttcacactctctactgggagcaatcaggcaaacccgatggacacccggttgtttttcttcacggcgggccgggaggagggacggctcctagtaataggagattcttcgatccggagttttatcggattgttctgtttgatcagagaggtgcggggaagagtacaccgcatgcttgtttggaggaaaacaccacatgggaccttgtgaatgatattgaaaaactaagagaacatttgaaaatacctgaatggctggtttttggaggatcatggggaagcactctagctcttgcatacagtcagtctcaccctgacaaggttactggtttggtccttagagggatctttttgttgcgtaaaaaggagattgactggttttacgagggcggtgctgctgctatttaccctgatgcttgggaggagttcagagatcttattccagaaaacgagagaggtagtagccttgtggacgcgtatcacaaaagattgaattctgatgatctggaaattcaatacgcagctgcaagagcttggactaaatgggaaatgatgactgcttatcttcgtccaaatcttgaaaacgttcaaaaggcagaggatgataaattttcattggcgtttgcaaggattgaaaatcactactttgttaacaaaggtttcttcccgtcggactcacacttgctagacaatgttgataaaatacgacatatcaagaccaccattgttcagggaaggtatgacgtatgctgtcctatgatgtctgcttgggatctgcacaaagcatggccagaggcagaactcaagattgtttatgatgctgggcactcggcaaatgagccaggaatatcagcggaactcgtggttgccaatgaaaagatgaaagcacttatgggatgaagtatttgatggaatgaaagctgctcattttgttcatttctttgggacctttgttcatattttcaagtttgttgctgcaaagtaaatatcacattcagagttagttgttaacgcgaaaccgaatgttatttccatggacgtttatacccaaatgaaaaagacaatgacataggtgcagtgttttgaaa

SEQ ID NO: 101 - DNA, 1213 bp, Arabidopsis thaliana
  source 1..1213: mol_type = genomic DNA
acagagttcagaatatcgacggcgacaatttctctctccggctaacttttttctagagaaagctatggcggacgaagaagatgagttactggagacagaactaagttacgaccagaaaaaggaaatcgccaagtggtttttcctcaacgctcccgctggagaaatcaattacgtcgctaaagatttaaaggcggttttgagcgatgaggaagtgtacaatgaagcagccatggaagcatttccagtgtacaacaaaactcacatgatttgccttgaaatgcccagtggagctggtgatgtgattgtctcatcttacagtgaaattaatgaaaatgagtaccttgatccaagaactgcccaggttgccatagttgatcatgttaaacagatttgtacaaaggtacggcctgcaaatgatgaagaacttccttctttgtatattgaggagtacagatatgctcttgatgctgaaatccagagatatgttagtgaatcttatccgaaaggtatgtctgcagttaattgtgtgaaagggaaagataatgagggtccagggtccgactttgagcttgttgttataattactgctatgagacttagtccccagaacttctgtaatggaagttggagatctgtatggaacatagatttccaggatgaatcccaggtgcttgacataaaagggaaattgcaggtaggagctcattattttgaagagggaaatgtggaattagatgcaaaaaaagatttccaagattcaacaatatttcagtctgcagatgactgcgcgattgccatagccaatattatcaggcaccatgaaacagagtaccttgcatctctagaggtagcttattcaaaattaccggataacactttcaaggatttgaggaggaaacttccggtgacacgaactctgttcccatggcagaacactttacagttcagcctaacaagagaggtcgagaaagaacttggacttggcaagataagtattatttctgttgtgtcttgtctttcctttggagtaatgtatacaaatcgcattagtaagtatgatagatattgttccgcaagccgcatgaaagaattgaagtttggtcccaaaaagagctccgttgccgggaatcgaacccgggtctcctgggtgaaagccagatatcctaaccgctggacgacaacggatatgttattggaactgttaaagaactaa

SEQ ID NO: 102 - DNA, 2160 bp, Arabidopsis thaliana
  source 1..2160: mol_type = genomic DNA
ctcgtctccttctccacttggatctcaaaagtccgatccaaaaccaaatccgccataactctctctctctctcccacttcccacagagagacacattcatgccagcaatgccaggtctcgtctcagtcaaaactccttccgatacaccgccgctacgtgtagccgtaccagacacgcaacctctctcaaacccgccgcgaactccgatgaagaaaaccccttcctctacaccatctcgatccaaaccatcaccaaatagatccaccggcaaaaaagattccccaaccgtatcctcctccaccgcagccgtaatcgacgtcgacgatccatctctagataatccagatctcggtcctttccttctaaaattagctcgtgacgctattgcttctggtgaaggtcctaacaaagcattagattacgcgatccgagcaactaagtcctttgagagatgttgcgccgccgttgctccgcctattcccggtggtagcgatggtggacctgttcttgatctcgctatgagccttcatgttctcgctgctatttactgtagtctcggccgatttgatgaagctgtaccacctcttgaacgagctattcaagtccctgatccgactcgtggccctgaccactctctcgctgcgttttctggtcatatgcaacttggtgatacgttgtctatgcttggtcagattgatagatctattgcttgttatgaagaaggtcttaagatccagatccagactttgggtgatactgatccacgagttggtgaaacttgcaggtacttagcagaagcatatgttcaagcaatgcagttcaataaagcggaagagttatgcaagaagactctagagattcaccgagcgcatagtgaacctgcttcactggaggaagcagctgataggagattgatggcaattatctgcgaggctaaaggagattatgaaaacgctcttgagcatcttgttcttgctagtatggctatgattgcgagtggacaagaatctgaggttgcatcgattgatgttagtattgggaatatttacatgtcgctgtgccggtttgatgaagctgtgttttcatatcagaaggctcttactgtgtttaaggcttctaaaggagagactcatccgacggttgcgtcagtgtttgttagattggctgagctttaccatagaacagggaaacttcgtgagtctaagtcttactgtgagaatgcgttgaggatatacaataagccggtgcctgggacaactgtggaggagattgctggtggattaactgagatttctgctatttatgagtctgtagatgaacctgaggaagcattgaagctacttcagaagtctatgaaattgcttgaggataagccaggacagcagagcgccattgcagggttagaggcacggatgggagttatgtattacacagtggggaggtacgaggacgcaagaaacgcgtttgagagcgctgtgacaaagctacgggcagcaggtgagaaatctgccttcttcggtgttgtattaaaccagatgggactagcctgcgttcagcttttcaagattgatgaagcgggtgagctgtttgaagaagcaagaggtattcttgaacaagaacgtggaccgtgcgatcaggacactctcggtgtttatagcaatctagctgctacctatgacgctatgggaaggatagaggatgcgattgagatattagagcaggttctgaagctgagagaggaaaagctcgggactgcgaatccggattttgaagacgagaagaaacgtttggccgagcttttgaaggaagctgggcggtcgcggaactacaaagccaagtcgctccagaatctgattgatccaaatgcaagacctccgaagaaagagtcttctgctaagaaatggcccagcctcggtttcaagttctgaggaaaaaattatcatataaaataaatcatccacatatatattcaatattttattttattgttattgttatattttttatctgatctattttctgtatcataatctgaggttgatgaattaatttcatgtatagtgtttttatttgagtttggtgaaatactgccaagatggtgagctgtttgtttgagtttgaaatttctttaattcaatcacttttttcttcttctgataa

SEQ ID NO: 103 - DNA, 2248 bp, Arabidopsis thaliana
  source 1..2248: mol_type = genomic DNA
ctcgtctccttctccacttggatctcaaaagtccgatccaaaaccaaatccgccataactctctctctctctcccacttcccacagagagacacattcatgccagcaatgccaggtctcgtctcagtcaaaactccttccgatacaccgccgctacgtgtagccgtaccagacacgcaacctctctcaaacccgccgcgaactccgatgaagaaaaccccttcctctacaccatctcgatccaaaccatcaccaaatagatccaccggcaaaaaagattccccaaccgtatcctcctccaccgcagccgtaatcgacgtcgacgatccatctctagataatccagatctcggtcctttccttctaaaattagctcgtgacgctattgcttctggtgaaggtcctaacaaagcattagattacgcgatccgagcaactaagtcctttgagagatgttgcgccgccgttgctccgcctattcccggtggtagcgatggtggacctgttcttgatctcgctatgagccttcatgttctcgctgctatttactgtagtctcggccgatttgatgaagctgtaccacctcttgaacgagctattcaagtccctgatccgactcgtggccctgaccactctctcgctgcgttttctggtcatatgcaacttggtgatacgttgtctatgcttggtcagattgatagatctattgcttgttatgaagaaggtcttaagatccagatccagactttgggtgatactgatccacgagttggtgaaacttgcaggtacttagcagaagcatatgttcaagcaatgcagttcaataaagcggaagagttatgcaagaagactctagagattcaccgagcgcatagtgaacctgcttcactggaggaagcagctgataggagattgatggcaattatctgcgaggctaaaggagattatgaaaacgctcttgagcatcttgttcttgctagtatggctatgattgcgagtggacaagaatctgaggttgcatcgattgatgttagtattgggaatatttacatgtcgctgtgccggtttgatgaagctgtgttttcatatcagaaggctcttactgtgtttaaggcttctaaaggagagactcatccgacggttgcgtcagtgtttgttagattggctgagctttaccatagaacagggaaacttcgtgagtctaagtcttactgtgagaatgcgttgaggatatacaataagccggtgcctgggacaactgtggaggagattgctggtggattaactgagatttctgctatttatgagtctgtagatgaacctgaggaagcattgaagctacttcagaagtctatgaaattgcttgaggataagccaggacagcagagcgccattgcagggttagaggcacggatgggagttatgtattacacagtggggaggtacgaggacgcaagaaacgcgtttgagagcgctgtgacaaagctacgggcagcaggtgagaaatctgccttcttcggtgttgtattaaaccagatgggactagcctgcgttcagcttttcaagattgatgaagcgggtgagctgtttgaagaagcaagaggtattcttgaacaagaacgtggaccgtgcgatcaggacactctcggtgtttatagcaatctagctgctacctatgacgctatgggaaggtaaagtcctaaagaaaactatctgactatgtaattagatcagacatccttaatgaaacattaaagtctttcttcgtgatggctatgtaatttgcaggatagaggatgcgattgagatattagagcaggttctgaagctgagagaggaaaagctcgggactgcgaatccggattttgaagacgagaagaaacgtttggccgagcttttgaaggaagctgggcggtcgcggaactacaaagccaagtcgctccagaatctgattgatccaaatgcaagacctccgaagaaagagtcttctgctaagaaatggcccagcctcggtttcaagttctgaggaaaaaattatcatataaaataaatcatccacatatatattcaatattttattttattgttattgttatattttttatctgatctattttctgtatcataatctgaggttgatgaattaatttcatgtatagtgtttttatttgagtttggtgaaatactgccaagatggtgagctgtttgtttgagtttgaaatttctttaattcaatcacttttttcttc

SEQ ID NO: 104 - DNA, 1337 bp, Arabidopsis thaliana
  source 1..1337: mol_type = genomic DNA
ttaaagtaatgacttttttttatatgatatattctcaattttgttactcggaaacaatagaaaggataacgaatcgtttctcttcgatcgaaagaatatatatttggaagttttctctgcttttttgttttcgtttgatagaatgggaacagttctcgattcgcattttctggctctcactgctattgtcactgtgatttaccagttcatattcttcgtaatcacggctcttttcaaatttgatcaagtcactgactttgctggtagcacaaacttcgttatacttgctgtgttaacacttgttctcaaagcctcttggcattttcgacagatagtattgactttgctagttgtggtatggggtcttcgcttggggattttccttctaatgaggatcttgcaatggggggaagatcgtcgctttgatgaacagcgtggaaatatagtgagactaatcattttctggactcttcaggctgtgtgggtttggacggttagcttacctttaacacttgttaatgcaagtgatggtggtggatctcttaaacccgcagatgttatcggttggactatgtgggttttcggtttcttgattgaagctgcagctgatcaacagaagctatcattcaaaaactctcctgaaaacagaggaaaatggtgtgatgttggagtctggaagtattcaagacatccaaactacttcggtgagatgttactgtggtggggaatctttgtggctgcatcgcctgtgcttgaaggtgcagagtatcttgtcatattcggaccactctttctcactttgctacttctattcgtcagcggcataccattactcgaggcatcggctgacaaaaaacatggaaactcaggagcttacagatcctacaagaagacaacaagtcctctgattctgttcccaagaggagtgtatgggaacttaccaggatggttcaagacggtctttctcttcgagtttccattttacagccgaaatctccctcaagagggtagactccaaaacagcaaagagaaagaagtaaaagatgactgatttgtgatactcatatttgagttattgttcttcacaacactctttgataaaatttgtgtaaaaaattgcccgtaagaaactgaatttgtttgaaatattggacagtcttgacagattatctcagttgtatttggttcttttttttatgtgattttgttttttggttaaaaaaagttcccattccaagaatcgaacccgggtctcctgggtgaaagccaaatatcctaaccgctggacgacatcggatttgattatttgattatttaattactttatatgttgattt

SEQ ID NO: 105 - DNA, 1079 bp, Arabidopsis thaliana
  source 1..1079: mol_type = genomic DNA
gaagagtaagagtaaaaaacaaaaccttcgtctctaacaaatgtgtggcagctgattgaaactagtagtggtgaaggagaaggagaatgggagatctctacgctttggacttcgatggagttctctgtgatagttgtggagaaagctctctatctgctgttaaggcagccaaagtgagatggcctgatttgttcgaaggagttgattccgctttagaggaatggatcgtcgatcaaatgcatattgtgagacctgtggttgaaactggctatgaaaatcttctacttgtgcggctgttattggagaccaagataccgtctattcgaaaatcttcagttgcagaggggttgacggttgatgggatactggagagctgggcaaagtttaagcccgtgatcatggaagcttgggatgaagatagagatgctttggtagatttgtttggaaaagttagagatgattggattaacaaggacttgacaacttggattggtgccaatagattctacccaggagtttcagatgcactgaaatttgccagctcaaagatttatatcgttaccacgaaacagggccgctttgcagaagcgttactgcgtgaaatagcaggtgtaatcataccatcagaaaggatttatggtttgggttcagggccaaaggtggaagttctaaagctacttcaagataaaccagaacatcagggcttgacgctgcatttcgtggaagacagactcgcaacgctgaaaaatgtcataaaagagcctgaattagacaaatggagtttatacctaggaacctggggatacaacactgagaaagagagagctgaagcagcaggcattcccaggattcaggttattgagctctccacgtttagcaataagcttaaatgagtgcatatactcattggaaaagaaacaaagctttcctctttattgtattctacggcattcaacggaaactaaaaaccaaacatgtttaggtaagattcagtaaaagagttgaactttcagtactacccattatagaagcttttctgtgacctataattcatccttagtaagatcattcttgttacc

SEQ ID NO: 106 - DNA, 1064 bp, Arabidopsis thaliana
  source 1..1064: mol_type = genomic DNA
gaagagtaagagtaaaaaacaaaaccttcgtctctaacaaatgtgtggcagctgattgaaactagtagtggtgaaggagaaggagaatgggagatctctacgctttggacttcgatggagttctctgtgatagttgtggagaaagctctctatctgctgttaaggcagccaaagtgagatggcctgatttgttcgaaggagttgattccgctttagaggaatggatcgtcgatcaaatgcatattgtgagacctgtggttgaaactggctatgaaaatcttctacttgtgcggctgttattggagaccaagataccgtctattcgaaaatcttcagttgcagaggggttgacggttgatgggatactggagagctgggcaaagtttaagcccgtgatcatggaagcttgggatgaagatagagatgctttggtagatttgtttggaaaagttagagatgattggattaacaaggacttgacaacttggattggtgccaatagattctacccaggagtttcagatgcactgaaatttgccagctcaaagatttatatcgttaccacgaaacagggccgctttgcagaagcgttactgcgtgaaatagcaggtgtaatcataccatcagaaaggatttatggtttgggttcagggccaaaggtggaagttctaaagctacttcaagataaaccagaacatcagggcttgacgctgcaactcgcaacgctgaaaaatgtcataaaagagcctgaattagacaaatggagtttatacctaggaacctggggatacaacactgagaaagagagagctgaagcagcaggcattcccaggattcaggttattgagctctccacgtttagcaataagcttaaatgagtgcatatactcattggaaaagaaacaaagctttcctctttattgtattctacggcattcaacggaaactaaaaaccaaacatgtttaggtaagattcagtaaaagagttgaactttcagtactacccattatagaagcttttctgtgacctataattcatccttagtaagatcattcttgttacc

SEQ ID NO: 107 - DNA, 1133 bp, Arabidopsis thaliana
  source 1..1133: mol_type = genomic DNA
gcagctgattgaaactagtagtggtgaaggagaaggagaatgggagatctctacgctttggacttcgatggagttctctgtgatagttgtggagaaagctctctatctgctgttaaggcagccaaagtgagatggcctgatttgttcgaaggagttgattccgctttagaggaatggatcgtcgatcaaatgcatattgtgagacctgtggttgaaactggctatgaaaatcttctacttgtgcggctgttattggagaccaagataccgtctattcgaaaatcttcagttgcagaggggttgacggttgatgggatactggagagctgggcaaagtttaagcccgtgatcatggaagcttgggatgaagatagagatgctttggtagatttgtttggaaaagttagagatgattggattaacaaggacttgacaacttggattggtgccaatagattctacccaggagtttcagatgcactgaaatttgccagctcaaagatttatatcgttaccacgaaacagggccgctttgcagaagcgttactgcgtgaaatagcaggtgtaatcataccatcagaaaggatttatggtttgggttcagggccaaaggtggaagttctaaagctacttcaagataaaccagaacatcagggcttgacgctgcagtaactcacgttctatatatctatcaataattcttctatctgcatgacttggtaatggtcaccattagtttacaatccctatgcatttttaatttggccagtttcgtggaagacagactcgcaacgctgaaaaatgtcataaaagagcctgaattagacaaatggagtttatacctaggaacctggggatacaacactgagaaagagagagctgaagcagcaggcattcccaggattcaggttattgagctctccacgtttagcaataagcttaaatgagtgcatatactcattggaaaagaaacaaagctttcctctttattgtattctacggcattcaacggaaactaaaaaccaaacatgtttaggtaagattcagtaaaagagttgaactttcagtactacccattatagaagcttttctgtgacctataattcatccttagtaagatcattcttgttacc

SEQ ID NO: 108 - DNA, 700 bp, Arabidopsis thaliana
  source 1..700: mol_type = genomic DNA
acatcttctcttttcttccccagcaaaaaatgagtctgcaaaatagaaaattcaagctgcgattgcgaggaagagaagagacttcagatctagcttgatccggtgataatggcgctcgagtgggtggttttaggttacgcggcggcggctgaagcgattatggtggtgctattgacgatgccaggactcgacggactccgcaagggattagtcgccgtcacgcgtaatctcctcaaaccgtttctctccatagttcctttctgtctcttcctcttaatggacatctactggaaatacgaaactatgccttcgtgcgatggcgattcctgcacaccgtcagagcatcttcgtcaccagaagtccatgatgaaatcccagcgaaacgcgcttctcattgcggctgcacttgtgttctactggatcctttactcagtcaccaatttggttgtcaagatcgagcatcttaaccagaggatcgagaggctcaggaacaaggattgatcgtctcgtctcaggttcaattagtgtaatgccttttttggttatctttcccatttggctaggttttctctttttcaacgtttctgatatgtgtcttttatcttgtggagattgaaggattttatcctacttttctatgtttggattcttatttgtaaccagattgtgattgtttcttgttgaattttgattgactcta

SEQ ID NO: 109 - DNA, 1754 bp, Arabidopsis thaliana
  source 1..1754: mol_type = genomic DNA
tctccacaaacaaacttgtactagaaaaatccctaaatctcaacaaaaccctaatttcaaggaagacgaagaaagaatgagttacagagtcgctaaagcatcgcagtatcttgcgatcaccggtggtgggatcacagacatcaagcttgcaaagaagtcttgggtgtttccatggcagtcttgcaccgtcttcgacgtttctccggtgaactacacgttcgaggttcaagctatgagttccgagaaacttccctttgttattcctgctgttttcacaatcggtcctcgcgttgatgatcctcacgctctcttgttgtatgccatgcttatgtctcaacacgataagcactcgaatcacgtcaatgagcttgttcagggtgttatcgaaggagagactcgtgttcttgttgcttccatgactatggaagaggtcttcaaaggaacaaaggagtttaagaaggaagtgtttgacaaggttcagctagagctaaaccagtttggtcttgtgatctacaacgccaatgtgaagcagcttgttgatgtgcctggacatgagtacttctcttacttgggccagaagactcagatggaagcagcaaaccaagccaagatcgatgtagcagaggcaaagatgaagggagaggttggtgccaaagaaaggactggactcacaatccagaatgcagccaagattgacgctgagtcaaagatcatctctactcaaaggctaggagaagggacaaaagaggagatcaaggtgaagactgaagtcaaagtgtttcagaatgagaaagaggctcttgttgctaaggctgatgcagcacttgcgattcaaaaggctgctttgtcccaaaactctcgtgtggctgaggttgaagcagccaaggctgttgctttgagggaagctgagcttcagactaaagtagagaagatgaatgcattgactcggacagagaagcttaaagctgagttcctcagtaaagccagtgttgagtatgaaactaaggtgcaagaagcgaactgggagttgtacaataagcaaaagcaagcagaagctgttctttacgagaagcagaagcaagcggaagcgacgaaagctgcagctgatgctgccttctattcaaaacagaaagatgcagagggacttgtcgcaatggccgatgctcaggggacttacctcaagaccctcttaggcgcagttaacaatgattactcagccatgagagacttcttgatgatcaacaatggcatttatcaggatattgccaagaccaatgctgttgcgatcagggacctgcagcctaagatcagcgtgtggaaccatggtggtgctgagcaggggatgaacggtggtggtaaagctacgatgaacgatattgctggactctacaagatgttaccaccggttcttgatacggtttatgagcagacagggatgcagccaccagcttggattggtacattgcgtggtgctgagcccaaacaatcacttcatgctcaacaacacagaggttgagatctcaaatgttgcttctttaattatacttttagctgttggggtttgttttctttttcttatgttatagaacttggaagttagagtttgaagttaaaacaatagtatctgacaaatgcgacttcgactagtgatttcgataaggatgtgtttttcctttttcaaatgtcagatttattattgcgtgttgaagatacctttcttctctcttgatacactaatataaataacatgttta

SEQ ID NO: 110 - DNA, 683 bp, Arabidopsis thaliana
  source 1..683: mol_type = genomic DNA
cacagaaccctccctctctagctctaaaaacatcccacaaactatctttcaacaacacaagacatatcacgaaacaaatcaaagcaaagatcatgaacacgattccagccgaactcactggatacttccactatctaccaccagataaatataataaccaaacaccaatcatggagtctgagtacttcaacatgccctcttctcctacttcttgttcctccttctaccacctcaatggtctgatcaacaacaacaactactcttcatcatccaatggtcaggatctaatgacgagcaacaactcaacttcagacgaagatcaccaacaaagtatggtcatcgatgagaggaaacaaaggagaatgatctctaacagggaatctgctcgtaggtcaagaatgagaaagcagagacatctcgatgagctttggtctcaagtgataagacttcgcactgataaccactgtcttatggataagctgaaccgcgtatctgaaagccatgagcttgctttaaaggagaacgctaagcttaaagaggaaacttctgatctcagacagctgatctctgagataaagtcacacaacgaagacgacaacagttttttaagagagctcgaagattcgatatcaaactctagatcggattcgaaccaaagcggcagagattttgagttgtgttaa

SEQ ID NO: 111 - DNA, 432 bp, Arabidopsis thaliana
  source 1..432: mol_type = genomic DNA
taagctagaggtttttagttctctgtgtggagtacggctgcattgtttctaccagtaatttgtgggatttccaagctccagtttttcgaatatggcggaagtaagtcttggtatgcttatagacattgtggacgaagagtggatgagggacactttgcctgatgatgatcttccattgcctccagtgcttgctgttaaaactgatgatactgaagaaaccaatcaggaaactcagcaagcagatgctgaaacttggcgtgatctagctcttgatacacagtaatagcctcttaagtacaatggaaaattcttacaagtcttgtttctcgttgtgtatgatcaaaaccaaaactgttcctggctttgtatttttttttggtagaagaggggggcgaacccccatttttattaaaactgaaaaactaaaaaaaa

SEQ ID NO: 112 - DNA, 3538 bp, Arabidopsis thaliana
  source 1..3538: mol_type = genomic DNA
gaagtagaagaagagaagtatctggagagagagaggcgtgcgatttccgcatcgaagaaacagtacggagttttatccgctccgattctgtggaagataatggggaaaggaggtgaagattgcgggaataagcaaactaatagttctgaattggtcaagtctgatacttttcctgcttggggtaaagatgtgtcggaatgcgaagagaagtttggtgttagtcgtgagaaaggtttgagcactgatgaggtgttgaaacggcatcagatctatggtttgaatgaattagagaagcctgagggtacttctatttttaagctgattttggaacagtttaatgatacattggttcgtattcttttggcggctgctgttatttcctttgtcttagccttctttgatggcgacgaaggtggtgagatgggtatcaccgcatttgttgagccgcttgttatttttctcatcttgattgttaatgccattgttggcatctggcaagaaactaatgctgagaaggcgttggaagctttgaaagagattcagtctcagcaagctaccgtcatgcgtgatgggactaaggtttccagtttgcctgcaaaggagcttgttcctggtgatattgtggaactgagggttggtgataaggtgcctgctgatatgcgtgtggttgctttgatcagttcaactttgagagtcgagcaggggtccttaacaggagagagtgaggcagtgagcaaaaccaccaagcacgtggatgagaatgctgatattcaaggaaagaaatgcatggtgtttgcaggaaccactgtcgtgaatgggaactgcatatgtttagttacagatactgggatgaatactgagattggaagggttcactcacagatccaggaagctgcacaacacgaggaagatacccctctgaagaaaaaacttaacgagtttggggaagttctgactatgatcattgggttaatttgtgcgttagtgtggctcatcaatgtcaaatactttctgtcatgggagtatgttgatggctggcccagaaactttaagttctccttcgagaagtgcacatattactttgagattgctgttgcactggcggttgctgcaattccagaaggtctgccagcagttattaccacatgtttggctcttggcactaggaagatggctcagaagaatgctctggttaggaagctacccagtgtggagactcttggatgcaccaccgtgatatgctctgacaaaactggaactcttacaaccaatcagatggctgtttcaaagctcgttgctatgggttcgaggatcggaactcttcgatctttcaatgttgaggggacctcgtttgatcctcgagatggaaagattgaagattggccaacgggtcggatggatgcaaatcttcagatgattgcaaaaattgctgccatttgcaacgatgctaatgttgagaaatctgatcagcaatttgtgtctaggggcatgcctactgaggcagctttgaaggttttggttgagaaaatgggatttcccgaaggattgaatgaagcttcatccgatggcaatgtcttacgttgttgtcggctatggagtgaactagaacaacggattgccacccttgagtttgaccgtgaccggaaatcaatgggagttatggtggattccagctcaggaaagaaactgctactggtcaagggtgccgtagaaaatgtattggaaaggagtacccatattcagctacttgatggttccactcgagagcttgaccaatactcaagggatcttattttacaaagcctacatgatatgtccttgagtgcattaagatgtctcggatttgcatactcagatgttccatcagattttgccacttatgatggcagtgaagaccatcctgctcatcagcaacttctcaacccatccaattattcatcaattgagtccaatctagtatttgttggatttgttggtttaagggatcctccaaggaaagaggtgcgtcaagccattgcagactgcagaacagcaggtattcgggtcatggttatcaccggagacaacaagagcacagcggaagcaatctgccgtgaaattggcgtatttgaagcagatgaagatatctcctcgagaagcttgacaggaaaagaatttatggatgttaaagatcagaagaatcatctaagacagacaggagggctcctgttctcaagggctgaaccaaaacacaaacaagagattgtcaggttactgaaagaagatggagaagtggttgccatgactggagatggagtcaatgatgctcctgccctgaagttggctgatattggtgtggctatgggcatttccgggacagaggtagcaaaggaggcatctgacttggtgttggcagatgataatttcagcaccattgttgcagctgttggtgaaggcaggtccatctataacaacatgaaggccttcatcaggtacatgatctcttccaacatcggtgaggttgcatcgatattcttgacagctgctcttggaatcccagaaggcatgatacccgttcaacttctgtgggtgaatctcgtaacagatggtcctccagctactgctttgggattcaacccccctgacaaggatattatgaaaaagcctcctcgtaggagcgatgactctcttatcactgcgtggatcctcttccgctatatggtgattggtttgtatgtgggagtagcaacggtgggagtattcatcatatggtacacacacaacagctttatgggcatagacctgagccaagacggtcacagccttgtgagctattcacagctcgcacattggggccaatgctcttcatgggaaggcttcaaagtgtctcctttcacagcaggctctcagactttctcgttcgactcaaacccttgcgactattttcagcagggtaaaatcaaggcatccacactctccctctcggtgttggtggccattgaaatgttcaactctctgaatgcactctcagaagatggcagcctggtgacgatgccaccctgggttaacccgtggctgctcctggcaatggctgtctcatttggactccactttgtgatattgtacgtcccattcttggctcaggtgtttggtattgtgccactgagcttgaacgagtggctgctagtgctggctgtgtcgctgccggtaattttgatagacgaagtgctcaagtttgtaggaaggtgcacgagtggctaccgctactcacctcgcactccctcagctaagcaaaaggaggagtaagaaaataattcaaaaggcattattattagactcttagttttagctgaaattaactttgttgctttactcatccttgctatatttaattctccaaacgataatttttggtttgaaaaagaaaagtttctaactttggttcatggacacagcccgtgatagaaagatgaatgtttcaaccaaaccttgattctttatgtaaacttttatggtcgaccaaattggtttttaagactgatggtaatttattttgggc

SEQ ID NO: 113 - DNA, 2087 bp, Arabidopsis thaliana
  source 1..2087: mol_type = genomic DNA
ataaacctacttcctttccttgcttcagctccccttttcttatccggaaaccaaaaacttccggtgataaaacctccttcgtcatctctctacttcttgctgaattttgtctgtctttgaagtggataaaatggcgtcaactttcactgccacatcttctattggttcaatggttgctccgaatggtcacaaatctgataagaaacttatcagcaagttgtcttcaagctcatttggaaggagacaaagtgtgtgtcctagacccagaagatccagttctgcaattgtgtgcgcagcaaaggaattacatttcaacaaagatgggactaccattaggagacttcaagctggtgtcaacaagctcgcagatcttgttggtgttacacttggacccaaaggacgaaatgttgttcttgagagcaagtatggatcaccacgaattgttaatgatggtgtgactgttgcaagagaggttgagttggaagacccggttgagaacattggcgctaagcttgtgaggcaagcggctgccaaaaccaatgacttggctggtgacggtacaacaacatctgttgttcttgcacaaggttttatcgctgagggtgtcaaggtggtagctgctggtgcaaaccctgttttgatcaccagaggtattgagaagacagcaaaggctttggttaccgagctcaagaaaatgtctaaggaggttgaagacagtgaacttgcagatgttgcagctgttagtgcgggtaacaacgacgaaattggaaatatgattgctgaagcaatgagcaaagtgggcaggaaaggtgtggtgacccttgaggagggtaaaagtgccgagaacaacctctacgtcgtagaaggaatgcaatttgaccgtggttatatctctccttactttgtgacagacagcgagaaaatgtccgtcgagttcgacaattgcaagttacttctcgttgacaagaaaattaccaatgcaagggatcttgttggtgttttggaggatgcaattagaggcggatacccaatattaattattgctgaagacattgaacaagaagctttagcgactcttgttgtaaacaagcttagaggtacactgaagatagcagctctcagagctccagggtttggagagcgcaagagccaataccttgatgatattgccattctaactggagcaactgtgatccgtgaggaagttggtctttcacttgacaaagctggaaaagaggttcttggtaatgcttcaaaggttgtcctcacaaaggagacctcgaccatagtgggtgatggaagcacacaggatgcagtgaaaaagcgtgttacacagattaaaaatcttattgagcaagcggagcaagattacgagaaggagaaactcaatgagagaattgcaaagctctctggtggagttgctgtgattcaggttggagcacaaactgagacagaactcaaagagaagaagttgagagttgaagatgctcttaatgcaacaaaggccgctgtcgaggaaggtattgttgttggtggtggttgcactctgcttcgtcttgcttccaaggttgatgccattaaagccacgcttgataatgatgaagaaaaggttggagcggatatagttaaaagagcactaagttaccccctaaaactaatcgccaagaatgctggtgttaatggaagtgtagttagcgagaaggtgctttccaacgataacgtgaaattcggttacaatgctgcaaccggcaagtacgaggatttgatggctgcaggaatcatcgatccaacaaaggttgtgagatgttgcttggaacacgcagcttcggttgcaaagactttcttgatgtcggactgcgttgttgttgagatcaaggaacctgaaccagttcccgtcggcaacccaatggacaactcaggatatggatactaagaggagataggctaatattgaaacggattactttagcttgcgagtgtaatgattttgaacaagagaatgtgtaatgtgaaactgaaattttgaattaatcatcatatgaataaatcatgattccctcaatgcttcgaaatatctcgaaatcgcc

SEQ ID NO: 114 - DNA, 2093 bp, Arabidopsis thaliana
  source 1..2093: mol_type = genomic DNA
ttaaaagcaccttccaagcgagagtaaggagataaacctacttcctttccttgcttcagctccccttttcttatccggaaaccaaaaacttccggtgataaaacctccttcgtcatctctctacttcttggataaaatggcgtcaactttcactgccacatcttctattggttcaatggttgctccgaatggtcacaaatctgataagaaacttatcagcaagttgtcttcaagctcatttggaaggagacaaagtgtgtgtcctagacccagaagatccagttctgcaattgtgtgcgcagcaaaggaattacatttcaacaaagatgggactaccattaggagacttcaagctggtgtcaacaagctcgcagatcttgttggtgttacacttggacccaaaggacgaaatgttgttcttgagagcaagtatggatcaccacgaattgttaatgatggtgtgactgttgcaagagaggttgagttggaagacccggttgagaacattggcgctaagcttgtgaggcaagcggctgccaaaaccaatgacttggctggtgacggtacaacaacatctgttgttcttgcacaaggttttatcgctgagggtgtcaaggtggtagctgctggtgcaaaccctgttttgatcaccagaggtattgagaagacagcaaaggctttggttaccgagctcaagaaaatgtctaaggaggttgaagacagtgaacttgcagatgttgcagctgttagtgcgggtaacaacgacgaaattggaaatatgattgctgaagcaatgagcaaagtgggcaggaaaggtgtggtgacccttgaggagggtaaaagtgccgagaacaacctctacgtcgtagaaggaatgcaatttgaccgtggttatatctctccttactttgtgacagacagcgagaaaatgtccgtcgagttcgacaattgcaagttacttctcgttgacaagaaaattaccaatgcaagggatcttgttggtgttttggaggatgcaattagaggcggatacccaatattaattattgctgaagacattgaacaagaagctttagcgactcttgttgtaaacaagcttagaggtacactgaagatagcagctctcagagctccagggtttggagagcgcaagagccaataccttgatgatattgccattctaactggagcaactgtgatccgtgaggaagttggtctttcacttgacaaagctggaaaagaggttcttggtaatgcttcaaaggttgtcctcacaaaggagacctcgaccatagtgggtgatggaagcacacaggatgcagtgaaaaagcgtgttacacagattaaaaatcttattgagcaagcggagcaagattacgagaaggagaaactcaatgagagaattgcaaagctctctggtggagttgctgtgattcaggttggagcacaaactgagacagaactcaaagagaagaagttgagagttgaagatgctcttaatgcaacaaaggccgctgtcgaggaaggtattgttgttggtggtggttgcactctgcttcgtcttgcttccaaggttgatgccattaaagccacgcttgataatgatgaagaaaaggttggagcggatatagttaaaagagcactaagttaccccctaaaactaatcgccaagaatgctggtgttaatggaagtgtagttagcgagaaggtgctttccaacgataacgtgaaattcggttacaatgctgcaaccggcaagtacgaggatttgatggctgcaggaatcatcgatccaacaaaggttgtgagatgttgcttggaacacgcagcttcggttgcaaagactttcttgatgtcggactgcgttgttgttgagatcaaggaacctgaaccagttcccgtcggcaacccaatggacaactcaggatatggatactaagaggagataggctaatattgaaacggattactttagcttgcgagtgtaatgattttgaacaagagaatgtgtaatgtgaaactgaaattttgaattaatcatcatatgaataaatcatgattccctcaatgcttcgaaatatctcgaaatcgcc

SEQ ID NO: 115 - DNA, 1960 bp, Arabidopsis thaliana
  source 1..1960: mol_type = genomic DNA
gtgaacgaagataaatttcgctattcctctctctctctctctctctctctctctctctctctctcttcttcttcttctccgttcgtgctctggactcgctcgaaatcgatccgatgataatttatgcagctcgaaacttaatttagaatcatacctttttctggatttggctgacgaatccgttttcaattgcacgagttgcttcgccaggtttatcaacttaagaatgtctaattatcaaggggatgatgctgagtacatggaagatgtggatgatgaaatggatgaggatgatttagatgaggattttcgtggggatgatatggctgcctctgattccgatgtcgatgagtttgactactctaataataaaatagctgacacttcagctgaccaagcccggaaagggaaagacatccaggggattccttgggacaggcttagtattacgagagagacatacagacaaactagactagaacagtataaaaattatgaaaatgtccctaactctggggaatcttcagggaaagattgcatggccacacagaaaggggctcttttttatgatttctggcggaatacaagatctatcaaatcaagtattcttcatttccagttgaggaatttggtttgggcaacttctaagcacgatgtctaccttatgtcacaatatttggtgagccactattctactttgacatccggaaagcatgatgttctcaatgttcaaggtcatgtttccccatctgagaaacatcctggaagtttgttggagggatttacaaagactcaagtgagtacactcgcagtgagagataaatttttagttgccggtggatttcaaggagaacttatatgcaagcatcttgatagacctggtgtgagcttttgttcacgtactacttatgatgataatgctataaccaatgctattgagatttataacaaacccagtggggcacttcattttactgcgtcgaataatgattgtggagtcagagattttgatatggagagataccagcttgttaaccagtttcgctttccatggccggtgaatcacacatctttaagtcctgatggtaaattgttgacgattgtgggagacaaccctgaaagccttctggtagaccccaacactggaaagacactggcaacgctatcaggacatctggacttttcctttgcatcagcatggcacccagatggattcacgttctccacaggtaaccaggacaagacctgccgggtttgggacattcgtaacctgtcaaaatctgttgctgtcttgaggggtaaccttggagcaatccgatccattcgctacacatctgatgggaagtacatggccatggctgagccggctgactttgtccatgtgtatgatgtctcaaacgggtatgaaacggagcaagagatcgacttctttggggagatctcgggaatatcatttagccccgacacagaagcactcttcataggcgtttgggaccgcacttacggaagtctaattgagtatagccggcgccacaactactcctaccttgattcatttctatgatcacccgacataccagaggaataaaagagccgatacatatgtgctgctgcactctcctgtcgctctgttaaactaagaaacccgagaaaagagaaaacataaactcaagtcgatctctaatggtgtaaatgatgtgttgtgcaagtactagtaggaatgttgtcacagagagcggatttagttagttaatgttcatttcttgtatgagtgttggagttcgtgtattgtacataagtatatgaggttcgggtgagtttgcatcaagtctcaactcttggcaaagagacaactttactcgagtctgtggctcgttatttggctatggtcacttgtagaggaactcaatttgagatgtttctgccgattgttggatcaaattatatatcatgatgtttc

SEQ ID NO: 116 - DNA, 2741 bp, Arabidopsis thaliana
  source 1..2741: mol_type = genomic DNA
aatcggcgcgtgatcgagaaagatcttctttaacctctttgcaacaaatctactcaaaaccctaacccctttttcaaattacttccatctttagatcgaatcaaatcaatgtccgtcgacgatctccctccgtcgtcggcctccgccgtaacgccactaggctcctccgtgattccgattgtgaacaagctccaagacatattcgctcagctaggaagtcaatcgacgatcgctcttccgcaagtagctgtcgtcggaagtcaaagcagtggcaaatccagcgttctagaagctctcgtcggccgtgactttcttcctcgtggcaatgatatttgcacgcgccgacctctccgtctccagcttgttcagacgaaacctagctctgatggtggatccgatgaagagtggggcgagtttcttcaccacgatcctgttagacgtatctacgatttctctgagattcgccgtgagattgaggcggagactaatagagtatcaggagagaacaaaggtgtatcagatattccgattggtttgaagatattttcacctaatgttttggatattagtcttgtggatcttcctggtatcactaaggttcctgttggtgatcagccaagtgatatcgaagcgcgtataagaacgatgatcttgacttacattaaggaacctagttgcttgatacttgctgttagccctgctaatactgatttagcaaattcagatgcattacaaatcgcaggaaatgctgatcctgatggtcatagaaccataggtgtaatcacaaagttggatattatggacagaggtactgatgctcggaatcaccttctgggaaaaacaattcctcttcgacttggatacgtgggagttgtaaatcgtagtcaagaggatattttgatgaaccgtagcatcaaggatgctcttgttgcagaggaaaagttctttcgtagtcgtccagtttacagcggtctcacagatcgtttgggtgtccctcaactggcaaagaaattaaatcaggtccttgttcaacacatcaaggcactgcttcctagtttaaagtcacgtatcaacaatgcattgtttgctacagcaaaggagtatgagagctatggggatataacagagtctaggggtggtcaaggagctcttctcctcagttttattacaaaatactgcgaagcatactcctctaccctggaagggaaaagtaaagaaatgtcaacatctgagctctcgggtggagcaagaattctctacattttccaatcagtatttgttaagagcttagaggaggttgatccatgtgaagacttaacagctgatgatattcggactgcaatacaaaatgcaactggtcccagatctgcattatttgttccagatgttccatttgaagttcttgtcaggaggcaaatatctcgtttattagatcccagccttcagtgcgctaggttcatcttcgatgagctagtaaagattagtcatcagtgtatgatgaaagagttacagcggtttccagtcctgcaaaagcgcatggatgaggttattgggaactttctgcgagaaggtcttgaaccttcgcaggcaatgatccgagatcttattgaaatggagatggattatataaacacctcacacccaaattttatcgggggaactaaagccgtggagcaagcaatgcaaacagtcaaatcttctaggattccgcatcctgttgcgcggccaagggatactgtggagcctgagaggacggcttcttccgggagtcaaataaaaacccgatcttttctcggccgacaagctaatggaatcatcactgatcaggcagttccaactgcagcagatgctgaaagacctgcaccagctggaagcacaagctggagtggtttctcatcaatttttcgggggagtgatggtcaggcagctgctaaaaacaacctattaaacaaaccattcagcgaaactactcaagaagtgtatcagaacttgtcaacaatctatttaaaggagcctccaactattttgaagtcatctgaaactcattcagaacaggagtcagttgagattgagataacaaagctattattgaaatcctactatgacattgtaaggaagaatgtcgaggacttggtcccaaaagcaatcatgcattttctggtaaattacacgaaacgtgagctgcacaatgttttcatcgagaagctttacagggagaacttaattgaagaactgttgaaagagcccgatgagttagcgataaagaggaaacgcacgcaagagactcttcgcattcttcagcaggctaatcggacgttagacgagctgccgttagaagctgaatcggtcgagagaggttacaaaattggttcagaagcgaaacatgaggagttaccgggcacaagaagatcaaggacagaaactaatgggaacggacggcttcatatgtaaattcaaattgtgattgcacgcatgactcattcatttggtgatggaaaagatttgttttcttccctttaaatcggttgtgcgtggggaaagaaaggtgttcttaggtatagtgaaacgtgatgataaacagaggttttgttgtgagggtattatcaacctactggaaaatgtgacttaatatttgtttctcaaaaccgagaagaataatcaattcctaattttacttttcatagctttatttgttacgaaaaacaagaacgtacatgagacaatgtaatgataaatttatc

SEQ ID NO: 117 - DNA, 2749 bp, Arabidopsis thaliana
  source 1..2749: mol_type = genomic DNA
gagaaagatcttctttaacctctttgcaacaaatctactcaaaaccctaacccctttttcaaattacttccatctttagatcgaatcaaatcaatgtccgtcgacgatctccctccgtcgtcggcctccgccgtaacgccactaggctcctccgtgattccgattgtgaacaagctccaagacatattcgctcagctaggaagtcaatcgacgatcgctcttccgcaagtagctgtcgtcggaagtcaaagcagtggcaaatccagcgttctagaagctctcgtcggccgtgactttcttcctcgtggcaatgatatttgcacgcgccgacctctccgtctccagcttgttcagacgaaacctagctctgatggtggatccgatgaagagtggggcgagtttcttcaccacgatcctgttagacgtatctacgatttctctgagattcgccgtgagattgaggcggagactaatagagtatcaggagagaacaaaggtgtatcagatattccgattggtttgaagatattttcacctaatgttttggatattagtcttgtggatcttcctggtatcactaaggttcctgttggtgatcagccaagtgatatcgaagcgcgtataagaacgatgatcttgacttacattaaggaacctagttgcttgatacttgctgttagccctgctaatactgatttagcaaattcagatgcattacaaatcgcaggaaatgctgatcctgatggtcatagaaccataggtgtaatcacaaagttggatattatggacagaggtactgatgctcggaatcaccttctgggaaaaacaattcctcttcgacttggatacgtgggagttgtaaatcgtagtcaagaggatattttgatgaaccgtagcatcaaggatgctcttgttgcagaggaaaagttctttcgtagtcgtccagtttacagcggtctcacagatcgtttgggtgtccctcaactggcaaagaaattaaatcaggtccttgttcaacacatcaaggcactgcttcctagtttaaagtcacgtatcaacaatgcattgtttgctacagcaaaggagtatgagagctatggggatataacagagtctaggggtggtcaaggagctcttctcctcagttttattacaaaatactgcgaagcatactcctctaccctggaagggaaaagtaaagaaatgtcaacatctgagctctcgggtggagcaagaattctctacattttccaatcagtatttgttaagagcttagaggaggttgatccatgtgaagacttaacagctgatgatattcggactgcaatacaaaatgcaactggtcccagatctgcattatttgttccagatgttccatttgaagttcttgtcaggaggcaaatatctcgtttattagatcccagccttcagtgcgctaggttcatcttcgatgagctagtaaagattagtcatcagtgtatgatgaaagagttacagcggtttccagtcctgcaaaagcgcatggatgaggttattgggaactttctgcgagaaggtcttgaaccttcgcaggcaatgatccgagatcttattgaaatggagatggattatataaacacctcacacccaaattttatcgggggaactaaagccgtggagcaagcaatgcaaacagtcaaatcttctaggattccgcatcctgttgcgcggccaagggatactgtggagcctgagaggacggcttcttccgggagtcaaataaaaacccgatcttttctcggccgacaagctaatggaatcatcactgatcaggcatttccaactgcagcagatgctgaaagacctgcaccagctggaagcacaagctggagtggtttctcatcaatttttcgggggagtgatggtcaggcagctgctaaaaacaacctattaaacaaaccattcagcgaaactactcaagaagtgtatcagaacttgtcaacaatctatttaaaggagcctccaactattttgaagtcatctgaaactcattcagaacaggagtcagttgagattgagataacaaagctattattgaaatcctactatgacattgtaaggaagaatgtcgaggacttggtcccaaaagcaatcatgcattttctggtaaattacacgaaacgtgagctgcacaatgttttcatcgagaagctttacagggagaacttaattgaagaactgttgaaagagcccgatgagttagcgataaagaggaaacgcacgcaagagactcttcgcattcttcagcaggctaatcggacgttagacgagctgccgttagaagctgaatcggtcgagagaggttacaaaattggttcagaagcgaaacatgaggagttaccgggcacaagaagatcaaggacagaaactaatgggaacggacggcttcatatgtaaattcaaattgtgattgcacgcatgactcattcatttggtgatggaaaagatttgttttcttccctttaaatcggttgtgcgtggggaaagaaaggtgttcttaggtatagtgaaacgtgatgataaacagaggttttgttgtgagggtattatcaacctactggaaaatgtgacttaatatttgtttctcaaaaccgagaagaataatcaattcctaattttacttttcatagctttatttgttacgaaaaacaagaacgtacatgagacaatgtaatgataaatttatcactggtaagttgatcttgttctt

SEQ ID NO: 118 - DNA, 2836 bp, Arabidopsis thaliana
  source 1..2836: mol_type = genomic DNA
gagaaagatcttctttaacctctttgcaacaaatctactcaaaaccctaacccctttttcaaattacttccatctttagatcgaatcaaatcaatgtccgtcgacgatctccctccgtcgtcggcctccgccgtaacgccactaggctcctccgtgattccgattgtgaacaagctccaagacatattcgctcagctaggaagtcaatcgacgatcgctcttccgcaagtagctgtcgtcggaagtcaaagcagtggcaaatccagcgttctagaagctctcgtcggccgtgactttcttcctcgtggcaatgatatttgcacgcgccgacctctccgtctccagcttgttcagacgaaacctagctctgatggtggatccgatgaagagtggggcgagtttcttcaccacgatcctgttagacgtatctacgatttctctgagattcgccgtgagattgaggcggagactaatagagtatcaggagagaacaaaggtgtatcagatattccgattggtttgaagatattttcacctaatgttttggatattagtcttgtggatcttcctggtatcactaaggttcctgttggtgatcagccaagtgatatcgaagcgcgtataagaacgatgatcttgacttacattaaggaacctagttgcttgatacttgctgttagccctgctaatactgatttagcaaattcagatgcattacaaatcgcaggaaatgctgatcctgatggtcatagaaccataggtgtaatcacaaagttggatattatggacagaggtactgatgctcggaatcaccttctgggaaaaacaattcctcttcgacttggatacgtgggagttgtaaatcgtagtcaagaggatattttgatgaaccgtagcatcaaggatgctcttgttgcagaggaaaagttctttcgtagtcgtccagtttacagcggtctcacagatcgtttgggtgtccctcaactggcaaagaaattaaatcaggtccttgttcaacacatcaaggcactgcttcctagtttaaagtcacgtatcaacaatgcattgtttgctacagcaaaggagtatgagagctatggggatataacagagtctaggggtggtcaaggagctcttctcctcagttttattacaaaatactgcgaagcatactcctctaccctggaagggaaaagtaaagaaatgtcaacatctgagctctcgggtggagcaagaattctctacattttccaatcagtatttgttaagagcttagaggtaatcactgtgtgtagatatctttgtttagttagtggggctatttgcacggaaggcagacagttcgtttcaggttttcagttcttggaagttgatccatgtgaagacttaacagctgatgatattcggactgcaatacaaaatgcaactggtcccagatctgcattatttgttccagatgttccatttgaagttcttgtcaggaggcaaatatctcgtttattagatcccagccttcagtgcgctaggttcatcttcgatgagctagtaaagattagtcatcagtgtatgatgaaagagttacagcggtttccagtcctgcaaaagcgcatggatgaggttattgggaactttctgcgagaaggtcttgaaccttcgcaggcaatgatccgagatcttattgaaatggagatggattatataaacacctcacacccaaattttatcgggggaactaaagccgtggagcaagcaatgcaaacagtcaaatcttctaggattccgcatcctgttgcgcggccaagggatactgtggagcctgagaggacggcttcttccgggagtcaaataaaaacccgatcttttctcggccgacaagctaatggaatcatcactgatcaggcagttccaactgcagcagatgctgaaagacctgcaccagctggaagcacaagctggagtggtttctcatcaatttttcgggggagtgatggtcaggcagctgctaaaaacaacctattaaacaaaccattcagcgaaactactcaagaagtgtatcagaacttgtcaacaatctatttaaaggagcctccaactattttgaagtcatctgaaactcattcagaacaggagtcagttgagattgagataacaaagctattattgaaatcctactatgacattgtaaggaagaatgtcgaggacttggtcccaaaagcaatcatgcattttctggtaaattacacgaaacgtgagctgcacaatgttttcatcgagaagctttacagggagaacttaattgaagaactgttgaaagagcccgatgagttagcgataaagaggaaacgcacgcaagagactcttcgcattcttcagcaggctaatcggacgttagacgagctgccgttagaagctgaatcggtcgagagaggttacaaaattggttcagaagcgaaacatgaggagttaccgggcacaagaagatcaaggacagaaactaatgggaacggacggcttcatatgtaaattcaaattgtgattgcacgcatgactcattcatttggtgatggaaaagatttgttttcttccctttaaatcggttgtgcgtggggaaagaaaggtgttcttaggtatagtgaaacgtgatgataaacagaggttttgttgtgagggtattatcaacctactggaaaatgtgacttaatatttgtttctcaaaaccgagaagaataatcaattcctaattttacttttcatagctttatttgttacgaaaaacaagaacgtacatgagacaatgtaatgataaatttatcactggtaagttgatcttgttctt

SEQ ID NO: 119 - DNA, 3430 bp, Arabidopsis thaliana
  source 1..3430: mol_type = genomic DNA
aaactaaaataaataaggaaaacactcttcttcaaatccagtagagagattcaagacgagtctcatcgaaagttcgaatctttcgtcatctgattagctttctcttagggtttatttcgatttcgatttagtgttctccatcaatggcgacacccatggttagttccgctggaggattactagcaatgctcaacgagcctcatcctgttttgaagcttcatgcgctctctaacctcaacaatttggttgaccaattctggcctgagatctccactagtgtccccatcattgagagtttatatgaagatgaagaattcgatctgcatcaaagacagcttgctgctttgctggtctctaaggttttctattacttgggcgagcttaatgattcgctgtcttatgccctaggagccggtcccttatttgatgtttcagaggattctgattatgttcatacgcttctggccaaagcaatagacgaatatgccagtctcagatcaaaggcagttgagtcaaatgagatggtggacattgatcccaggctagaggcgattgttgaaagaatgcttggaaaatgcatcagtgatgggaagtatcaacaagccatgggcattgcgatagaatgccggagattggataagttggaagaagctatcattaagagcgataatgttcagggaactttatcatattgcatcaatgtttctcattcctttgtcaaccgcagagagtacagacatgaggtgcttagtttacttgtaaaagtctaccagaagctgccctctcctgattatttgagcatttgtcaatgcctcatgtttttggatgaaccgcaaggtgttgcaagcatattggagaagcttcttcgctcagagaacaaggatgatgctttattggcattgcaaattgcatttgatcttgtagagaacgagcaccaggcctttctcttgagtgttagagatcgccttccagctcccaaaacacgtgctgtagaagcaactcaggctgttgaaacaactattgctcctaatgagaacccttcgggagatgttcagatggcagatgaaactccagctcagacaattgtgcatgagacggatccagttgatgctacatatgctgagaggttaacaaagattaagggaattttatctggagagacatctattcagctgacactgcagtttctttacagccacaacaaatcggacctgctgatactgaagacaatcaaacagtctgtagagatgcggaacagtgtatgccacagtgctacaatatatgctaatgccattatgcatgctggaactacagtggacactttccttagagagaatttggattggctaagcagggcaaccaattgggctaagttcagtgctaccgcgggattaggtgttattcacagaggtcacctgcaacagggtaggtcattgatggctccatacttgcctcagggaggagcaggtggtggtgggagtccttattccgaaggaggtgctttatatgctcttggccttattcatgctaaccatggcgagggaatcaagcaatttctacgtgatagcctacgcagcactaatgttgaggtcattcaacatggagcttgtttaggtcttggcttgtcagctctcgggacagctgatgaagagatatatgatgatgtcaaaagcgtgctttatactgacagtgcagttgctggtgaagctgctggcatcagcatgggtttattattggttggaactgctactgaaaaggcaagtgagatgctcgcttatgctcatgagacacaacatgagaagataataaggggattggctctaggaatagctcttacagtatatggtagagaagaaggagcagataccttgattgagcagatgacgagagatcaggatccaatcattcgttatggtggcatgtacgcattggcattggcttacagtggaaccgcaaacaacaaggcaattcgacaattgctgcactttgctgtatctgatgtcagtgatgatgttaggaggactgccgttctggcacttggatttgtcttgtactctgatccagagcagactccccgtattgtatcactgctttctgagtcatacaatccacatgttcgctatggtgcggctcttgcagtgggtatttcttgtgcaggcactggcctcagcgaagcgatatccttgttggagccacttacatcagatgttgttgactttgttcgtcaaggtgctttgattgcaatggccatggtgatggttcaaattagcgaagctagcgattctcgtgttggagtatttaggcgccaacttgagaagattatacttgacaagcacgaagatacaatgagcaagatgggagcgattctggcctctggtatccttgatgctggtggtaggaacgttactataagactgctctctaagaccaaacatgacaaagtcactgctgttatcggccttgcagtcttcagccagttttggtattggtacccactgatctatttcattagtttggccttctcaccaaccgctttcatcggtttgaactatgaccttaaggtcccaaagtttgagttcatgtcacatgcaaaaccgtctttatttgagtacccaaaacccaccacggttcctacagccaataccgccgttaaacttccaaccgctgttctctcaacttcagttaaagccaaagctagggctaagaaagaagcagagcaaaaagctattgctgagaaaacatctggccctgaaaagcctgtcaatgaaagtggatctggaaaaggaaaagcatcaactgagaaggaaggagactctatgcaggtcgatagcccagcagcggtcgagaagaaagcacctgagcctgagccagcgtttgagattttagtgaacccagctcgagtagtcccagctcaagagaaatacataaagttacttgatgacagcagatatgtaccagtgaagctagcaccgtcaggtttcgttcttctcaaagacttgcgtgaacacgagccagaggttctctctctgaccgacgcaccaacttcaacagcttctcctgcaactggtacagcagcggctgcacaaggaaccccggcctcagctatggccgtagatgatgagccacaacctccacaagcctttgaatacgcttcatgattttatttcatttaaaattagtgggaatttgttgttggttttattggtttctgttgaaagacaaaaggcagagagaaaaacagatctttgaactttgagataactgcttcttgtcatttgcaactggtttcatgttcaactacgatcttgtattaggtacttctctttttaagtattatctaaataattaagtgtcgttttatgtcttttagtggtactggtatatctgatttcttctacaacaagatagtaataaactacattttctaagt

SEQ ID NO: 120 - DNA, 1570 bp, Arabidopsis thaliana
  source 1..1570: mol_type = genomic DNA
cctcttcctcttcaagccacaaagactcataaaaatccaacctttttctcatttcctctgttaaatttttcctgaaaagtttattcctttttctacagatcgaatttcgtagttctcacctcactgaatctgttactttctctataatctaaatcttcaaaaatgtttctggttttgtgaaatcaacacttaaaaactcgagcttttacctcctctgttttttcaaagataaaaatgagagaagacgattcagactggttcgcaagatgggaagaagaacttccatcaccagaagagctcatgccaatatcacaatctctaatctcacccgatctagctctagccttcgatatacgaaccccaaatcacggaaacggaaactcaaaccaacctcatcatcatcatcatcaccaaaccacacctcctacaccgtctcagcttcagcttccatcttctcaagccaattcctcagccgaattcgctgcagattcagcagatctaggctccggaggagctgccggagacgaaccagctcggactttaaaacgacctcgtcttgtctggacaccgcagctgcataaacgtttcgttgatgctgttgcgcatttagggattaagaacgcagttcctaaaacgattatgcagcttatgagtgttgatggtttaactagagaaaacgttgcgagtcatttgcaaaagtatagactttatcttaagagaatgcaaggtttgtcttctggtggtggtgctggttcagatccagctactgatcgtcttttcgctagctctcctgttcctgctcactttcttcatcctaatcgtgttcccagttctgatcatttcatgccgtcttttgttcctattgctactcttcaacaacaacaacaaatggctgctgctgcggccgctgctgcagcagctaatcctcatttacaaccgcctcagttccaccgtcaaatcgcagctgcgcattttggttcaccgactaatggtggattcagttcaccgacgagtaatggacagtttggatcaccgactagtaatggatttggatcaccgacgactaatgggaagtttgatccttcgttcttggcggtgaggcaaacgcagcagcaaccaattcagagaatgtctacaccatcattgcatagtccagttagtaattacgttgaggatttggaatctgcaaacgctaatggagggagaactgtcttaactttattcccaactcgagacgattaaaaagtcattatctttccggttactagatgttcaaaatgtctctgcagtcatcaagaacatgagtcagctgatcgttcttgtgcatcggttttatccggtggcgtttactctgtgcagtcttatcagtttaacattgatacaatccagcgtcaatgtgtggtcaagttctgtatctgaagctcaagcaccttcaggtcaaggcttgtattaacccttgtagctttcttgtgtaagattaatgtaaagatgagtttacttttgaacgtacatccgtacgaacaaactcaagattggaaaaaagaatgaaaaaaacaaaaacttacttcac

SEQ ID NO: 121 - DNA, 3856 bp, Arabidopsis thaliana
  source 1..3856: mol_type = genomic DNA
cgccggggactttgatatcatctgcgccgaacaaaaactctgcagaaaccctaattttcgtcagtgattgattcttccgtttccaccatggaagaagtatgcgaaggaaaagaattctcattccctcgtcaagaagaagatgtcctctccttctggactgaaatcgatgctttcaagacacagctcaaacgcactgagaatcttcctgagtacatcttctacgacggacctccttttgccaccggacttcctcactacggacatatcctcgctggtacgattaaagatattgtgactcggtatcagaccatgactggtcaccatgtcactcgtcggtttgggtgggattgtcatggcttacctgttgagaatgagattgatcggaaattgaatattaagaggagagatgaagttattaagatgggaattgataagtataatgaagagtgtaggagtattgtgactcgttatgttgctgagtgggagaaggttattactaggtgtggtcgttggattgattttaagaatgattataagactatggatttgccttttatggaaagtgtttggtgggttttttctcagctttgggagaagaatcttgtttacagaggattcaaggttatgccgtacagtactggttgtaagacacctttatctaattttgaagctggtcagaactataaggaagtccctgatcctgaaatcatggtgacttttccggttattggggatcaagataatgctgcttttgtggcatggactactactccgtggactcttccaagcaatcttgctttgtgtgtaaatgcgaagtttgtctatgtgaaggttcgtaacaagaacactggaaaagtgtacattgttgctgaatctcggttgtctgctcttcccactgataagcctaaggccaagttaagtaatggacctgctggtgatactaagaaagcaaatcctaaagctaaaggtgctaaacctgagagtgcagctgattcttatgaagttttggagaaatttaatggagcttccctggttgggaagaagtatgaacctttgtttgattactttagtgatttctcaagtgaggcctttcgagtagtagcagatgattatgtcactgatgacagtggtactggtattgtccactgtgctcctgcctttggtgaagatgattatcgtgtttgtcttttgaacaaaataatcaaaaagggggagaatctagttgttgctgttgatgatgatgggttgtttactgagagaattacccacttcagtggccgttatgtcaaagatgcagacaaggatataattgaagccgttaaggccaagggcaggcttgttaaaacgggaagctttactcactcatacccattttgctggcgatcagacaccccactcatatatagagcagttccaagttggtttgtgcgtgtggagcagttgaaagaaaagttgttaaaaagcaatgaacagacagaatgggtacctggttatgtgaaggataaacgttttcacaattggctcgaaaatgcaagggattgggcaatcagccgaagtagattttggggcacgcctcttccgatatggataagtgatgatggggaggaagttgtgatcatggattccgtagagaagcttgaaaagctctctggtgttaaggtctttgacctgcatcgtcaccatattgatcatattacaattccatctagtcgtggcgatgagtttggtgtgctccgtcgtgtagaagatgtttttgattgttggtttgagagtgggtcaatgccttacgcgtatatccattatccgtttgaaaacaaggagttatttgagaagaactttcctggtgattttgtggctgaaggtcttgatcagactcgtggatggttttatactcttatggtgttgtctactgcattatttgaaaaaccagcgtttaaaaatctgatttgcaatggtcttgtacttgctgaggatgggaaaaagatggctaagaaattacggaattatccaccacctttggaagtcatagatgagtatggggctgatgctgtgcgattgtacctgataaattctccggttgtacgtgctgagccactacgcttcaaaaaagaaggagtactcggtgttgtcaaagatgtattccttccatggtacaatgcatatcggttcctcgttcagaatgcaaagagacttgagactgaaggtggtgtgccctttgttcctactgatctggcaactatacagtcagcaaacattcttgatcagtggattcactcagctacgcagagtcttgttcgttttgtccgcgaggagatggatgcctatcggctttacactgtggttcctcgtctcttgaagttcctcgacaatctcactaacatatatgtcagattcaaccgcaagagattaaaaggccgtacgggggaagatgattgtcacactgctctttcgactctattcaatgtgctccttacttcttgcaaagtgatggccccgtttacacctttcttcactgaaactttgtaccagaatctgcggaaagcgtgtaaaggttctgaggaaagtgttcactactgcagtattccaccaagggaaggaatggaaggggagaggattgagttaagtgttacgaggatgatgaaaatcattgatcttgctcggaacattcgtgagcgtaacaaactacccttgaaaactcctctaaaggaaatgattgtagtccatcccgatgctgatttcttaaatgacataactggagtactaagagagtatgtcttggaagaacttaacgtgagatcgcttgtaccatgcaatgatactctgaagtatgcatcactaaaagcagaaccagatttcagtgtattgggaaagcgacttggaaagtcgatggggcttgttgcaaaggaagttaaagaaatgtctcaaaaagatatcttagcatttgaggaggctggggaagttactattgctaaccacttgctaaaggaaacagatatcaagattgttagggttttcaaacgcccagacgatttgaaagagaatgagattgattcagctggagatggtgatgttttggtgattctggatctacgagcagatgattctttggttgaagcaggttttgcccgtgagattgtaaacaggatccagaaactaaggaaaaagtcaggtctggaaccaacagactttgtggaagtgtacttccaatcattggacgaggatgaatctgtttctaaacaagttctagtctctcaggaacaaaacatcaaggattcaattggctccactttacttttgtctagtttaatgccatcacatgcagtcataatagccgatgagacattcaccccaaaagaaacatccgatgagagtgtcaaaaaggttccaaagttgtcgtataagataagtttggctagaccggctttgaagttcaatgaagaggctgttcttgctttatactcaggagatgtgaaatctgcaaccgggcttcaaacatacttgttatcaagggatcattcgaatttgaagtcagagttccaagccggagatgggaagataactgtaagctgcattgaaaatgtgcctgttgcgactgtggttcttggcgaacatctccatttgagtgtcggcgatgacttattgagcaagaggaacgcatgagccgtccctccggttttgtttgatttattgtggtaacttgggatttatttcccttatttttcttcttccatatcttacctataaactacttatttagattgttgcaaaaagttaaatctcagtgttgagactctcttttactcgttctatttgtacaatactaaacttttattcatctcaaaatttatggttggac

SEQ ID NO: 122 - DNA, 2933 bp, Arabidopsis thaliana
  source 1..2933: mol_type = genomic DNA
atcttctttctatagtttccatgaagtcttcttcttctcagagctacgatgttttccccaacttcagaggggaagatgtccgccactcattagtcagccaccttcgtaaggaacttgatcgcaaattcatcaatacattcaacgacaacaggatcgaaagaagccgcaaaataaccccagagctgttattggctatagaaaactcaaggatctcacttgtcgtcttctctaaaaactatgcttcttccacgtggtgcttagatgaattggtgaagatccaagagtgctatgagaaattggatcaaatggtgattcctattttctacaaagtagatccttctcatgttagaaaacagaccggagagtttggcatggtctttggggagacctgcaagggcagaacagagaatgagaagcgaaaatggatgcgagctctagcagaggtagcacatctagccggagaagatcttcggaactgataagtttcaggtgggtaaacttccgataagtgattgtcggaacagtgtgtatgaggattaaacacagagaaagatcgtgtggtgattgtagtgtcggtaaacaagtttttaaagcctcccagctgtaatgtatcaaccgtcggaaaggggtgggtcccacgagcctgagtaaagacgcgtagcgaagcagaaatgcttgaaaatatcgccaaggatgtttcaaacaaactcttccccccatcaaataatttcagtgacttcgtcgggattgaagctcatatagaggcattgatatcaatgttgcgcttcgactccaagaaagcgcgaatgatagggatttgtgggccttctgaaactggtaagactactataggaagagctttatacagcagactcaaaagcgacttccaccatcgggctttcgtagcatataagagaaaaatacggagcgactatgaccagaagctgtattgggaagaacaatttctatcagaaattctttgtcagaaggatataaagatagaggaatgtggtgcggtggaacaacgactaaagcacacgaaagttcttattgttcttgatgatgttgatgatatagagctactaaaaacgttggtaggacgtatcagatggtttggatctgagagcaaaattgttgtgattactcaaaaaagggaacttctcaaggctcacaacattgcacatgtttatgaagtgggattcccatcagaagaactggctcatcaaatgttttgtcgatatgcttttgggaaaaactctccacctcatggtttcaacgagcttgcagatgaagctgcaaagattgccggtaatcgtcctaaagctctcaagtacgttggttcgtcttttagaagactagacaaggaacaatgggtgaagatgctatcggagttccgtagtaatgggaataaactaaaaatcagctatgatgagttagatggtaaaggtcaagattacgttgcgtgtttaaccaatggttcaaattcccaggtgaaggcagagtggatccacttggcactaggcgtgtctatattacttaacatccgcagtgacggaacgacaattctcaaacatttgagctacaatcgaagcatggcgcaacaagcaaaaatatggtggtatgaaaatttggaaagagtgtgcaagaagtacaatatatgtggcatagatagctcaactgatggtggtggttcaacgtatggacaatgttcaaattcccaatttcaaagaaacatggacgcaagccccgggggaaacaaaaccagtaatcaatccacaaaagattcaccgagagcttctcaagtagagaaggaaaagatcgagtactgtgagccacatgtatatataacacctgccatcttcagtgacggaaccagagctcccaaatacgtggagtctagtagccgaagagtaacccaagtgcaccacgccaaaacatggtggccggagaattgtgaaaaagtgtacgagaaccacaacaacatatatggcatagatagatcaattgacggtggtgataagtttgagggaaaaagtaaagttagtgacggtgggttagacggcaaagatcaaggttcaatgtatggacaaagttcaaattccgagcttcaaataaacatggacgcagacaataggagatgtgaacctgtgagtgagatgcttttcaaaaattacaatgtgtgttcgcctaatgcacatatgcctgcaggtttaaccgatgtaaactgttcaaatccccagtctcaaagaaaattggacgcaagcctaaagaaagacaaaattgtgcatgagtggattcgaaccggtagtggcttcttttttgattttcagggcccaaaatctatagtgagtgctgctcaagtggacgagaaaaatttcgagtactgtgaacaaggtgtgtatataacacttggcatcctcagtggcggaattatagttctcaaacatttggagttcagccgaagaatggcgcaacaagcaaaagtttggtggtcggaaaattggataaaagtgtaccaggagcacaacatatgtggcatagataaatcatttgatggtaggtttgatgatagacgtgtcattcgtcaattaagaccaaactgaagcacggcctggcccttgtaaaagtcaggacttgagctagatacttaagccaagcagatctgtttggctaagtctggtcgggttagcgcgaaattgtcgaaatctgtttaataattgcattcagtgcaagtctttaatttgtacttcatggctttaatacactaattaaacattggatcatttttagttttttcttcttttcaaaatacatatttttctaagttttccaatttagtgattttattagttctttagtagaatactggatcatggacacatgctacaacatgctttgacctaattatgaaatttatcagcgaatatattatg

SEQ ID NO: 123 - DNA, 960 bp, Arabidopsis thaliana
  source 1..960: mol_type = genomic DNA
tcgtcgccgttaaaatctgcgatctcattgctcattggtgaagacaaatccctaattcgtatgtcagattctgtggccggcgatttccctcccgatccacttctcgcctccggagccttcatctcctccgccggtgacggaaccctagacagtagtgcgaaacgacgaccgattcagggaggaatcggaatttctggttcgggagagagcgtacgcatcgggatggctaacggcactgatcaggtgaatcatcagacggaatcgaagtcgcggaagcgtgcggcgcctggagataattggttgcctcctggttggagagttgaagataagattcgaacttccggtgccacagctggttcggtggataagtactattacgaaccaaatacaggacgtaagtttcggtccaggactgaggtgctgtactacttggaacatggaacttctaaaagaggcaccaagaaagctgagaatacatatttcaatccagaccattttgaaggccaaggaagcaatagagtcaccagaaccgctacagtgcctccacctccgccaccgccattggactttgattttaagaatccaccagacaaggtaagctggtctatggcaaacgcaggagaagaaggttggatacctaatattggggacgtcaaggttcaagactcagtgagacgagattggagcactgcgtttacctttatcacaagccgaaaccctagtaaagtgtcggcttgaagactatgatgacctggtggcgatttttgggttgttgcatctatggtaagatacacagatatgttagggttacttaattggataattcttgtttagtcttcattcatcaatcatcaagttatgtgtactataatttttgtagcggtttttggaagaatatgataaggggatatgcatctttgtgtttgcttttggaacgtgataaccattcgacttttgact

SEQ ID NO: 124 - DNA, 464 bp, Cardiovirus A
  source 1..464: mol_type = other DNA
gagggcccggaaacctggccctgtcttcttgacgagcattcctaggggtctttcccctctcgccaaaggaatgcaaggtctgttgaatgtcgtgaaggaagcagttcctctggaagcttcttgaagacaaacaacgtctgtagcgaccctttgcaggcagcggaaccccccacctggcgacaggtgcctctgcggccaaaagccacgtgtataagatacacctgcaaaggcggcacaaccccagtgccacgttgtgagttggatagttgtggaaagagtcaaatggctctcctcaagcgtattcaacaaggggctgaaggatgcccagaaggtaccccattgtatgggatctgatctggggcctcggtgcacatgctttacatgtgtttagtcgaggttaaaaaaacgtctaggccccccgaaccacggggacgtggttttcctttgaaaaacacgatgataat

SEQ ID NO: 125 - DNA, 228 bp, Tobacco mosaic virus
  source 1..228: mol_type = other DNA
atctaagttaggttgtaaacatattagagacgttgttcatttggaagagttacgcgagtctttgtgtgatgtagctagtaacctaaataattgtgcgtatttttcacagttagatgaggccgttgccgaggttcataagaccgcggtaggcggttcgtttgctttttgtagtataattaaatatttgtcagataagagattgtttagagatttgttctttgtttgata

SEQ ID NO: 126 - DNA, 101 bp, Hibiscus chlorotic ringspot virus
  source 1..101: mol_type = other DNA
tagcttgtttgggttctttatcactgtcctgattaaggctgaatcagaacactttcacttccacacacacgacagtagtaagacacaaaatatagtagtta

SEQ ID NO: 127 - DNA, 147 bp, Zea mays
  source 1..147: mol_type = other DNA
agcacaacatttcaaccagaaacactagccgaagcaaatccattccacaagcacctggtgggatcatctcatcatcagaaaccaagagagagattccgtgtccgcttgttgtagtagattgtgaggactgaggaccgagaagcagcc

SEQ ID NO: 128 - DNA, 196 bp, Plautia stali intestine virus
  source 1..196: mol_type = other DNA
aagctgactatgtgatcttattaaaattaggttaaatttcgaggttaaaaatagttttaatattgctatagtcttagaggtcttgtatatttatacttaccacacaagatggaccggagcagccctccaatatctagtgtaccctcgtgctcgctcaaacattaagtggtgttgtgcgaaaagaatctcacttcaa

SEQ ID NO: 129 - DNA, 174 bp, Kashmir bee virus
  source 1..174: mol_type = other DNA
aatttaaatatgttaataatgctgaagacaagtatttcgattattaacctctatatttctatataaagtatctgtgagtctcagtggacatcacagtaaggtcgcagttaacttgtaatcttttcattcctgtgtcggagcagtggtaatggagccggacgatttcgccaaaac

SEQ ID NO: 130 - DNA, 204 bp, Solenopsis invicta virus
  source 1..204: mol_type = other DNA
aacgtttctcttctggttaccagcaacataggaaattgtcgttgaactacatgttgtaaggctttagagaaataagggagtgtcctatttaggatgaggtgctccggtggcagccccaccaaaacctctagcgactaggaacagctatatcgggttgctatagcagtcaggatgtcattctggcgttccgaaatacccaaacct

SEQ ID NO: 131 - DNA, 178 bp, Triatoma virus
  source 1..178: mol_type = other DNA
tgatcttgctttcgtaataaaattctgtacataaaagtcgaaagtattgctatagttaaggttgcgcttgcctatttaggcatacttctcaggatggcgcgttgcagtccaacaagatccagggactgtacagaattttcctatacctcgagtcgggtttggaatctaaggttgactc

SEQ ID NO: 132 - DNA, 211 bp, Cricket paralysis virus
  source 1..211: mol_type = other DNA
taaaaagcaaaaatgtgatcttgcttgtaaatacaattttgagaggttaataaattacaagtagtgctatttttgtatttaggttagctatttagctttacgttccaggatgcctagtggcagccccacaatatccaggaagccctctctgcggtttttcagattaggtagtcgaaaaacctaagaaatttacctgctacatttcaagata

SEQ ID NO: 133 - DNA, 353 bp, Cricket paralysis virus
  source 1..353: mol_type = other DNA
ttcgataccaagagctggtgtctgagggattacgactcgcgtggtcggacagcacatgttagtcatgtattatggtgtttcccaacacgtatctttgctctagtattgaactttagtgatgagtgtacttggcatgtacacctgattagttagcccttgtggatacgccactgccgctcaggtacagtaggacataccccaaatattgggttccactcgtagagaagaaaattagtggcgaaacgtacggtttatgtcaaaggagaaggtgattttaattgcacctgaagcaaccctaggtcttccctttgatgtgagctaataaggagtaaccgattcttacaatgtgatca

SEQ ID NO: 134 - DNA, 232 bp, Hepacivirus C
  source 1..232: mol_type = other DNA
gcctccaggaccccccctcccgggagagccatagtggtctgcggaaccggtgagtacaccggaattgccaggacgaccgggtcctttcttggataaacccgctcaatgcctggagatttgggcgtgcccccgcaagactgctagccgagtagtgttgggtcgcgaaaggccttgtggtactgcctgatagggtgcttgcgagtgccccgggaggtctcgtagaccgtgcacc

SEQ ID NO: 135 - DNA, 116 bp, Turnip crinkle virus
  source 1..116: mol_type = other DNA
ctctctctcactggtcctcctactttgtcatctgattcctgaaatcaaaccgattcacacatcctacaacacacacgactcatcgaagcagcaacacataagcatcaacactggaa

SEQ ID NO: 136 - DNA, 148 bp, Turnip vein-clearing virus
  source 1..148: mol_type = other DNA
gaattcgtcgattcggttgcagcatttaaagcggttgacaactttaaaagaaggaaaaagaaggttgaagaaaagggtgtagtaagtaagtataagtacagaccggagaagtacgccggtcctgattcgtttaatttgaaagaagaaa

SEQ ID NO: 137 - DNA, 579 bp, Rhopalosiphum padi virus
  source 1..579: mol_type = other DNA
gataaaagaacctataatcccttcgcacaccgcgtcacaccgcgctatatgctgctcattaggaattacggctccttttttgtggatacaatctcttgtatacgatatacttattgttaatttcattgacctttacgcaatcctgcgtaaatgctggtatagggtgtacttcggatttccgagcctatattggttttgaaaggacctttaagtccctactatactacattgtactagcgtaggccacgtaggcccgtaagatattataactattttattatattttattcaccccccacattaatcccagttaaagctttataactataagtaagccgtgccgaaacgttaatcggtcgctagttgcgtaacaactgttagtttaattttccaaaatttatttttcacaatttttagttaagattttagcttgccttaagcagtctttatatcttctgtatattattttaaagtttataggagcaaagttcgctttactcgcaatagctattttatttattttaggaatattatcacctcgtaattatttaattataacattagctttatctatttata

SEQ ID NO: 138 - DNA, 367 bp, Homo sapiens
  source 1..367: mol_type = other DNA
aattccagcgagaggcagagggagcgagcgggcggccggctagggtggaagagccgggcgagcagagctgcgctgcgggcgtcctgggaagggagatccggagcgaatagggggcttcgcctctggcccagccctcccgctgatcccccagccagcggtccgcaacccttgccgcatccacgaaactttgcccatagcagcgggcgggcactttgcactggaacttacaacacccgagcaaggacgcgactctcccgacgcggggaggctattctgcccatttggggacacttccccgccgctgccaggacccgcttctctgaaaggctctccttgcagctgcttagacgctggatttttttcgggt

SEQ ID NO: 139 - DNA, 222 bp, Israeli acute paralysis virus
  source 1..222: mol_type = other DNA
gtatagtgttctggaggcatcattctatggttacccatcattagaggaaatttccaataaactctggtgtaaggcttagagtgatggtcgaggtgccctatttagggtgaggagcctcggtggcagccccaccaaatcctctattggataggaacagctgtactgggcagttacagcagtcgtatggtaacacatgcggcgttccgaaataccatgcctggc

SEQ ID NO: 140 - DNA, 174 bp, Drosophila C virus
  source 1..174: mol_type = other DNA
aatgattttgaaacatattaagatgtttatacgagcgtgttgtttactattttcaggatatgtggaagcggttgtgtatgatctatacgcacatttagttcccagagggcgttgtcgtctccccctaagcaagggagaaacacgtggcacatgatcttgcgcttaacgataaaa

SEQ ID NO: 141 - DNA, 190 bp, Black queen cell virus
  source 1..190: mol_type = other DNA
ccaacaatgtgatcttgcttgcggaggcaaaatttgcacagtataaaatctgcaagtagtgctattgttggaatcaccgtacctatttaggtttacgctccaagatcggtggatagcagccctatcaatatctaggagaactgtgctatgtttagaagattaggtagtctctaaacagaacaatttacct

SEQ ID NO: 142 - DNA, 174 bp, Homalodisca coagulata virus 1
  source 1..174: mol_type = other DNA
ttgcctctctcaacaaaaagccaccgacattaagagagagagtattgctgcttagttaactgcaggccctatttagggttaccgcccaggatctgcaacagcattcctgtatcatccagggcaccggtggacttggtgaggattgagttgacctcatcattagagaccagactc

SEQ ID NO: 143 - DNA, 184 bp, Aphid lethal paralysis virus
  source 1..184: mol_type = other DNA
aattactaatttgatctttaggttataatgttaggactataaaaattagcttaatgcatttagtaatttaaggcttagttatttaactttacttatcaagatggccgttggcagccccacgaaatctagattagtccgaatgtcctattttgattaggtggtcagataggtcagaaactcacct

SEQ ID NO: 144 - DNA, 174 bp, Himetobi P virus
  source 1..174: mol_type = other DNA
catccgtaatacaacccggaataacctccaaaccgagaagaactagtctatgaccagacgaaaaggaactagtccctgttcttttcttagggcctttttcacctgggtaaagtgtagttattgcgtataactctggtatcaataccacccggaagaaattatttatctgccatc

SEQ ID NO: 145 - DNA, 174 bp, Mud crab virus
  source 1..174: mol_type = other DNA
catttatttatattaaatactgacactttgcgggttaaaatgtttaatactatttttcaatttgaggttgtatgagataattttgatttctatgttatcattgaataagggagtctggccctaattgatgtacgactcttctttggttgcgacccgagtcccttctacatcaag

SEQ ID NO: 146 - DNA, 642 bp, Canine picodicistroviurs
  source 1..642: mol_type = other DNA
aactctaagccgaacaattatagctaggctttttattatataacattaattaggcattagcgttgtcgccaatctcttggtaatcctaaggatacctttcctgttgactaagatgaagcgccttcggttaccgatgcccggtgtccacgaagccatcgtggtcggccgcgtcccccacctctcccaacttggactccatgttttcagtaggtgtaatgattagtattattgattctgctcgttcaatgtgtttatcttcacgatctgggacccaacacatgcttcactcatgtttaaatgttggttccctcattttgaagacacccaaaccatagagtgcgagaatgaggatttctacttccattctggtaacagaaatgaattcctgcgtgtgtctcgtaaatggaatctttaagaacttcagataaatcgaacaatacactaatacaagttgttttctaccaacatgttcaatgcggctaatctgaccgtggagctgtgaagcgctcaaacccgagtgttgtatacagtcgtaatgcgtaagtccatgaggaaccgactactgttacctctgttggtgtgtttctcctttattctcttttattattatttgttattgcaaatactacaactttgatcaac

SEQ ID NO: 147 - DNA, 130 bp, Arabidopsis thaliana
  source 1..130: mol_type = genomic DNA
gtaaggatttttatgatatagtatgcttatgtattttgtactgaaagcatatcctgcttcattgggatattactgaaagcatttaactacatgtaaactcacttgatgatcaataaacttgattttgcag

SEQ ID NO: 148 - DNA, 91 bp, Arabidopsis thaliana
  source 1..91: mol_type = genomic DNA
gtaacattccttagttacctttcttttctttttccatcataagtttatagattgtacatgctttgagatttttctttgcaaacaatctcag

SEQ ID NO: 149 - DNA, 108 bp, Arabidopsis thaliana
  source 1..108: mol_type = genomic DNA
gtgctcttgaaattggaactcttcttttgttgtctaaacctatcaatttctttgcggaaatttatttgaagctgtagagttaaaattgagtcttttaaacttttgtag

SEQ ID NO: 150 - DNA, 101 bp, Arabidopsis thaliana
  source 1..101: mol_type = genomic DNA
gtaagttgttacttatgattgttttcctctctgctacatgtattttgttgttcatttctgtaagatataagaattgagttttcctctgatgatattattag

SEQ ID NO: 151 - DNA, 121 bp, Arabidopsis thaliana
  source 1..121: mol_type = genomic DNA
gttagtatcatatgaagaaatacctagtttcagttgatgaatgctattttctgacctcagttgttctcttttgagaattatttcttttctaatttgcctgatttttctattaattcattag

SEQ ID NO: 152 - protein, 124 aa, Arabidopsis thaliana
GTAAATCCTGGTCCACACTTTTACGATAAAAACACAAGATTTTAAACTATGAACTGATCAATAATCATTCCTAAAAGACCACACTTTTGTTTTGTTTCTAAAGTAATTTTTACTGTTATAACAG

SEQ ID NO: 153 - protein, 136 aa, Arabidopsis thaliana
GTAAGAGGTCAAAAGGTTTCCGCAATGATCCCTCTTTTTTTGTTTCTCTAGTTTCAAGAATTTGGGTATATGACTAACTTCTGAGTGTTCCTTGATGCATATTTGTGATGAGACAAATGTTTGTTCTATGTTTTAG

SEQ ID NO: 154 - DNA, 150 bp, Arabidopsis thaliana
  source 1..150: mol_type = genomic DNA
gtaagttctgcatttggttatgctccttgcattttaggtgttcgtcgcacttccatttccatgaatagctaagattttttttctctgcattcattcttcttgcctcagttctaactgtttgtggtatttttgttttaattattgctacag

SEQ ID NO: 155 - DNA, 121 bp, Arabidopsis thaliana
  source 1..121: mol_type = genomic DNA
gtaaagcaactgtgttttaatcaatttcttgtcaggatatatggattataacttaatttttgagaaatctgtagtatttggcgtgaaatgagtttgctttttggtttctcccgtgttatag

SEQ ID NO: 156 - DNA, 136 bp, Arabidopsis thaliana
  source 1..136: mol_type = genomic DNA
gtaaagtttccaactttcctttaccatatcaaactaaagttcgaaactttttatttgatcaacttcaaggccacccgatctttctattcctgattaatttgtgatgaatccatattgacttttgatggttacgcag

SEQ ID NO: 157 - DNA, 121 bp, Arabidopsis thaliana
  source 1..121: mol_type = genomic DNA
gtctgtctttcctatttcatatgtttaatcctaggaatttgatcaattgattgtatgtatgtcgatcccaagactttcttgttcacttatatcttaactctctctttgctgtttcttgcag

SEQ ID NO: 158 - DNA, 159 bp, Arabidopsis thaliana
  source 1..159: mol_type = genomic DNA
gtaaaatattggatgccagacgatattctttcttttgatttgtaactttttcctgtcaaggtcgataaattttattttttttggtaaaaggtcgataatttttttttggagccattatgtaattttcctaattaactgaaccaaaattatacaaaccag

SEQ ID NO: 159 - DNA, 109 bp, Arabidopsis thaliana
  source 1..109: mol_type = genomic DNA
gtaaggacttctcatgaatattagtggcagattagtgttgttaaagtctttggttagataatcgatgcctcctaattgtccatgttttactggttttctacaattaaag

SEQ ID NO: 160 - DNA, 189 bp, Solanum tuberosum
  source 1..189: mol_type = genomic DNA
gtttgtttctgcttctacctttgatatatatataataattatcattaagtagtagtaatataatatttcaaatatttttttcaaaataaaagaatgtagtatatagcaattgcttttctgtagtttataagtgtgtatattttaatttataacttttctaatatatgaccaaaacatggtgatgtttag

SEQ ID NO: 161 - DNA, 94 bp, Cucumber mosaic virus
  source 1..94: mol_type = other DNA
gtttatttacaagagcgtacggttcaatccctgcctcccctgtaaaactaccctttgaaaacctctctttcttaatcttttctttgtaattcct

SEQ ID NO: 162 - DNA, 74 bp, Brome mosaic virus
  source 1..74: mol_type = other DNA
gtagaccacggaacgaggttcaatcccttgtcgaccacggttctgctacttgttctttgtttttcaccaacaaa

SEQ ID NO: 163 - DNA, 107 bp, Citrus tristeza virus
  source 1..107: mol_type = other DNA
aatttcacaaattcaacctgttcgcccagaaaatacgtctggcacaacagggatccggaataggtccagcctttaagctctaatattcccacaacaaaaattacact

SEQ ID NO: 164 - DNA, 107 bp, Beet yellows virus
  source 1..107: mol_type = other DNA
gtttttaaccatccttctactagacgtacactcgtacatcctctagtatttcctttatttatcttcccataagcccctgcctttaacgtttaactctcgctatcgac

SEQ ID NO: 165 - DNA, 206 bp, Cowpea mosaic virus
  source 1..206: mol_type = other DNA
tattaaaatcaatacaggttttgataaaagcgaacgtggagaaatccaaacctttctttctttcctcaatctcttcaattgcgaacgaaatccaagctttggttttgctgaaacaaatacacaacgtatactgaatttggcaaatttctctctctctctctgtcattttctttcttctgtcgggactttcttagtcttgacccaac

SEQ ID NO: 166 - DNA, 84 bp, Potato virus X
  source 1..84: mol_type = other DNA
gaaaactaaaccatacaccaccaacacaaccaaacccaccacgcccaattgttacacacccgcttggaaaagcaagtctaacaa

SEQ ID NO: 167 - DNA, 161 bp, Potato virus A
  source 1..161: mol_type = other DNA
aaaataaacaaactacaaaacacaatcaagaaatcaaacgaattagagcaatcaatcttctaaatcttcaagcagttcacaacattttaaacacaatcaaaacttgaacaagttcaatcaaacacccaaattcagtttaaatactcaaaacgcaagcatca

SEQ ID NO: 168 - DNA, 184 bp, Potato virus Y
  source 1..184: mol_type = other DNA
aattaaaacaactcaatacaacataagaaaaacaacgcaaaaacactcataaacgctcattctcactcaagcaacttgctaagtttcagtttaaatcatttccttgcaattctctagaacaatattggaaaccatttcaactcaacaagcaatttcatcacttccaaccaatttcagatcctca

SEQ ID NO: 169 - DNA, 167 bp, Pepper mottle virus
  source 1..167: mol_type = other DNA
aaattaaaacataacatacaacataaacgaaagcaatcaaattttcaagcatttttcttgagctctttgatttttcctgcataaattaagcactttgatcaacaacatagtctcgatttgaatatttcaattgtttccagttttctctaatagcactccatactaaa

SEQ ID NO: 170 - DNA, 190 bp, Bean yellow mosaic virus
  source 1..190: mol_type = other DNA
aaaaaatataaaaactaaacaagacaatacaagacataacgcattcagaccttcaaacattcgcaagctttaaacaactttgtgtgaatttcgagtataagatttctaaaattctaaaattaaagtaattagtctttctttaagtgtcaatcaaatttgagtttttcgttattactattgcaagcttata

SEQ ID NO: 171 - DNA, 91 bp, Barley stripe mosaic virus
  source 1..91: mol_type = other DNA
gtatgtaagttgcctttgggtgtaaaatttcttgcatgcacataatcgtaatcgattcttcttgatctctaaacaacactttcccgttagc

SEQ ID NO: 172 - DNA, 115 bp, Wheat stripe mosaic virus
  source 1..115: mol_type = other DNA
cgaaagttaacactgagtacacacgatcccttgataccagcagcatctgtgagcttgtttggttaggcaacgcgggtcgaggtttactctgattgtacactggaaattatcagca

SEQ ID NO: 173 - DNA, 79 bp, Rice yellow mottle virus
  source 1..79: mol_type = other DNA
acaattgaagctaggaaaggagcatattgcgaaagcatccctccttccgacgaacaattgtagccacactgcatcgtgt

SEQ ID NO: 174 - DNA, 139 bp, Maize dwarf mosaic virus
  source 1..139: mol_type = other DNA
aaaaacaacaagactcaacacaacacaaccaaacacgaccaaacacaaccaaattacacgttattggagcacattcagtttgcaggcaacggttcgtttgcaaggtgcatcgaaaagcctctctgaacacacgatcgca

SEQ ID NO: 175 - DNA, 138 bp, Zucchini yellow mosaic virus
  source 1..138: mol_type = other DNA
aaattaaaacaaatcacaaagactacagaaatcaacgaacaagcagacgatttctaaaccgtgtttacaaacaagcaatctataattcgcacagcatcaagaatttctgcaatcactttgtttattttagacacaaca

SEQ ID NO: 176 - DNA, 132 bp, Watermelon mosaic virus
  source 1..132: mol_type = other DNA
aaattaaaactactcataaagacatcaaacaaaacaaacgcaaacaaattctcaagttttcaagctatttcaagcaatttgcattttcgatatttataagtttacgattcatcaatatcaacaacaacacga

SEQ ID NO: 177 - DNA, 148 bp, Sugarcane mosaic virus
  source 1..148: mol_type = other DNA
aaaacaacaaaactcaatacaacacaacaaaacacatccaagcaaaccaacgacatttgcaatcaaacttcagcgcacggctcaaaagagaaggctctttgagaacgctctctgaacttccctccttcggcattcgacttccggcgag

SEQ ID NO: 178 - DNA, 68 bp, Tobacco mosaic virus
  source 1..68: mol_type = other DNA
gtatttttacaacaattaccaacaacaacaaacaacaaacaacattacaattactatttacaattaca

SEQ ID NO: 179 - DNA, 71 bp, Tomato mosaic virus
  source 1..71: mol_type = other DNA
gtatttttacaacaattaccaacaacaacaacaaacaacaacaacattacattttacattctacaactaca

SEQ ID NO: 180 - DNA, 67 bp, Turnip vein-clearing virus
  source 1..67: mol_type = other DNA
gtttagttttattgcaacaacaacaacaaattacaataacaacaaacaaaatacaaacaacaacaac

SEQ ID NO: 181 - DNA, 69 bp, Pepper mild mottle virus
  source 1..69: mol_type = other DNA
gtaaatttttcacaatttaacaacaacaacacaaacaacaaacaacattacaaacaaaatacaactaca

SEQ ID NO: 182 - DNA, 63 bp, Turnip crinkle virus
  source 1..63: mol_type = other DNA
ggtaatctgcaaatccctggcacccgcctaaaattgccctcatcaaccttctctctattcacg

SEQ ID NO: 183 - DNA, 165 bp, Tomato bushy stunt virus
  source 1..165: mol_type = other DNA
naaattctccaggatttctcgacctagttcgtttatctggtgacttgcgctaccgttgctttgcgtagagaatttctctccataattattatctttagttgtggggtttgaaggttgggtctacctttcggggggataaattgtaacttccaacaaacaagcgac

SEQ ID NO: 184 - DNA, 33 bp, Tomato spotted wilt virus
  source 1..33: mol_type = other DNA
agagcaatcaggtaacaacgattttaagcaaac

SEQ ID NO: 185 - DNA, 32 bp, Watermelon bud necrosis virus
  source 1..32: mol_type = other DNA
agagcaatcgtgcaacaataagaatatcagta

SEQ ID NO: 186 - DNA, 87 bp, Turnip yellow mosaic virus
  source 1..87: mol_type = other DNA
gtaatcaactaccaattccagctctcttttgacaactggtcttatacccacttccgtacacttgcaaccctcgtaagacaattgcaa

SEQ ID NO: 187 - DNA, 281 bp, Cucumber mosaic virus
  source 1..281: mol_type = other DNA
cggtctccctcttcgggcgggatctgagttggcggtaatctgcaaaccgtctgaagtcactaaacacattgtgtggtgaacgggttgtccatccagctaacggctaaaatggtcagtcgtggagaaatccacgccagtagacttacaagtctctgaggcacctttgaaaccatctcctaggtttcttcggaaggacttcggtccgtgtacttctagcacaacgtgctagtttcagggtacgggtgccccccactttcgtgggggtctctaaaaggagacca

SEQ ID NO: 188 - DNA, 274 bp, Brome mosaic virus
  source 1..274: mol_type = other DNA
tgcgcttgtctctgtgtgagacctctgctcgaggagagccctgttccaggtaggaacgttgtggtctaactcaagactagctgaatcggtgctataaccgatagtcgtggttgacacgcagacctcttacaagagtgtctaggcgcctttgagagttactctttgctctcttcggaagaacccttaggggttcgtgcatgggcttgcatagcaagtcttagaatgcgggtgtcgtacagtgttgaaaaacactgtaaatctctaaaagagacca

SEQ ID NO: 189 - DNA, 273 bp, Citrus tristeza virus
  source 1..273: mol_type = other DNA
ttgaagtggacggaataagttcctcgcggaactttgtgttgggttggtaaagacccttatgatggtgatatatcactagacaataaccggatgggtaaagtctttaaaatgatcgaggggaaaattaaccgtatcctctcgttggtctaagctcccacagagtggtagtggtctcaagtgaggcttaacgtatgcgtgaaccaaagaagttctccttagagtgtgtgttgtttacccaacgcactgtccctatggggggccaacataggtcca

SEQ ID NO: 190 - DNA, 182 bp, Beet yellows virus
  source 1..182: mol_type = other DNA
tagagaagtgacggaggcgacctacctaccgtgtaatttaagtcgtcacagagtgacaacggcaccaagtggtgcttagtgcgtatgtaaattacgaagtgcaaaaaatttttctttttatattaagaaaatttttgcacactcctagcgaagtcccgctaggaagaaaaaataaggggccc

SEQ ID NO: 191 - DNA, 72 bp, Potato virus X
  source 1..72: mol_type = other DNA
ctacgtctacataaccgacgcctaccccagtttcatagtattttctggtttgattgtatgaataatataaat

SEQ ID NO: 192 - DNA, 227 bp, Potato virus A
  source 1..227: mol_type = other DNA
taaccgaagtgccgtactattactaagtaagagttcctgttagtatccttgtcttattattagaatacgtttatctttcaacaagtatgatgttcgtgctctcacctcgcaacagtgagtttgagtgggaaataaatactagtattctatggccttacttgttatatagacccaccacatagtgagattttatctcggtgactggttttatgtttcaactgtcaggg

SEQ ID NO: 193 - DNA, 328 bp, Potato virus Y
  source 1..328: mol_type = other DNA
tgtagtgtctctccggacgatatataagtatttacatatgcagtaagtattttggcttttcctgtactacttttatcataattaataatcgtttgaatattactggcagataggggtggtatagcgattccgtcgttgttagtgaccttagctgtcggttctgtattattaagtcttagataaaaagtgccgggttgttgttgtgtgactgatctatcgattaggtgatgctgtgattctgtcatagcagtgactatgtctggatttagttacttgggtgatgctgtgattctgtcatagcagtgactgtaaacttcaatcaggagac

SEQ ID NO: 194 - DNA, 266 bp, Pepper mottle virus
  source 1..266: mol_type = other DNA
ctgatgtggtctctgggatgaaatattattatatgtagtatgcaatatatagtatggcttttctcgttccagtctttatattaatgagagtaacttaagtaagtaatttgtacttcaaggattaatcaaggtgactctctgacactctcagtgaggtgacttgtttagtctgagtttacttattgtgagtataaagaatctctcagaaaacgagagtgacttctagacacactctaggaggtgatcgtagttggcatgagagagac

SEQ ID NO: 195 - DNA, 171 bp, Bean yellow mosaic virus
  source 1..171: mol_type = other DNA
agtatccgtctttaaattctctataatttggcgttacattacttaatactatgtattagtgaggtttcacctccagcattttaaattcagtatgtgtatcattctctctactctgacagggtaagcagttagtgaggttgcctcgtgtgagcctgatctttgtagagcgag

SEQ ID NO: 196 - DNA, 257 bp, Barley stripe mosaic virus
  source 1..257: mol_type = other DNA
aaaaaaaaaaaaaaaaaaatgtttgatcagatcattcaaatctgatggtgcccatcaaccatatgatgggagtgtttgcaagtccactataatcgaacttgaaaacgatgcctgaattggaaaccatgaatcttaacggattctggagagaaaatttaggaattggtatgtaagctacaacttccggtagctgcgtcacactttaagagtgtgcatactgagccgaagctcagcttcggtcccccaagggaagacca

SEQ ID NO: 197 - DNA, 350 bp, Wheat stripe mosaic virus
  source 1..350: mol_type = other DNA
gcgttgtcactcgtccgaagacgttaaactacggtgtcgttcattcgacgtgagattctgagttatgggtattgctacaaacccacacgaggtggtcgtccgtgcctgacattaagttgttgggatagaccagggcaagtcgggactttggctagaagtttgtgggtaacttcactgttaaaccctctggttcaacgtcagaaccacctaggagataatactctgggtttagttggcgtctgttgtaattatttataattcagcattttaaaatttcaagaaggtctttgaccatatagttgtactgggtgtgagttgtaccagtgtgttgttaactatgtttgtgtata

SEQ ID NO: 198 - DNA, 246 bp, Rice yellow mottle virus
  source 1..246: mol_type = other DNA
atccacggattggctacgagatcgacttaccctgaaaaggatgttgagcgttcttgaacgcggcccaatcctacgagatgatactggtgactatcctacgtgaggagttgcactcacgcttcaacccaaagcgacccatgcactggacagtgcttacccagatggttttcggagctactgggcggacctttcaccaaaccgaattccccactctttccgagagaattctcgggatgggtgggggag

SEQ ID NO: 199 - DNA, 250 bp, Maize dwarf mosaic virus
  source 1..250: mol_type = other DNA
tacggggttcaacttttacgcagtaatttagtaatatataagtaagctattgtggtgaggttgtacctcgttagttttatatatatattatgctacgtacctactatgtctgcaagtgagtgaggttgcacctcgacacttatagtgggcactattactagcttcgaatcacgagacggacggtccattgagtggttctaccacgaggatgcagcgagtttcgtggtgagagacaaaaaaaaaaaaaaaa

SEQ ID NO: 200 - DNA, 213 bp, Zucchini yellow mosaic virus
  source 1..213: mol_type = other DNA
taaagggtaggtcacctacctaggttatcgattcgctgccgacgtaattctaatatttaccgctttttatgatatctttagatttcagtgtgggcctcccacctttaaagcgtaaagtttatgttagttgtccaggaatgccgtagtcctgtcggaagctttagtgtgagcctctcacggataagctcgagattagactccgtttgcaagcct

SEQ ID NO: 201 - DNA, 249 bp, Watermelon mosaic virus
  source 1..249: mol_type = other DNA
agactaggtaaactggtcacagttagcatttcgggtcgttataagttttctataatataatatgttgcactttttagtatagtgtgattttatcacctttgtactgtttatgttagtgtggtttaaccatcttagtgtgctttatattatagtttatgcataacagggagaaccattacaataccggagttgtttgtagtgtgattacatcacggttaatagccgaggtacggtaatgtttgttgtcct

SEQ ID NO: 202 - DNA, 235 bp, Sugarcane mosaic virus
  source 1..235: mol_type = other DNA
tctcctggaaaccctgtttgcagtatctatagtatgttatgtgtactagtattaaaagtgaggctttgtctcgtttctgcttttactatttacgtactataagtgtgaaccagtctgcaagatacagggttggacccagtgtcttctggtgtagcacatactagcgtcgagccatgtcacggacagcgctgaggatggctttgccatgtgtgctgcgagtctcatggtgagagac

SEQ ID NO: 203 - DNA, 204 bp, Tobacco mosaic virus
  source 1..204: mol_type = other DNA
ggtagtcaagatgcataataaataacggattgtgtccgtaatcacacgtggtgcgtacgataacgcatagtgtttttccctccacttaaatcgaagggttgtgtcttggatcgcgcgggtcaaatgtatatggttcatatacatccgcaggcacgtaataaagcgaggggttcgaatccccccgttacccccggtaggggccca

SEQ ID NO: 204 - DNA, 201 bp, Tomato mosaic virus
  source 1..201: mol_type = other DNA
atgcataggtgctgaaatataaattttgtgtttctaaaacacacgtggtacgtacgataacgtacagtgtttttccctccacttaaatcgaagggtagtgtcttggagcgcgcggagtaaacatatatggttcatatatgtccgtaggcacgtaaaaaagcgagggattcgaattcccccggaacccccggttggggccca

SEQ ID NO: 205 - DNA, 235 bp, Turnip vein-clearing virus
  source 1..235: mol_type = other DNA
gcgtagtgcgcacgatagcgcatagtgtttttctctccacttaaatcgaagagataaacttacggtgtaattccgtgagggtggcgtaaaccaaattacgcaatgttttgggttccattaaaatcgaaaccccttatttcctggatcacctgttaacgcacgtttgacgtgtattacagtgggaataagtaaaagtgagaggttcgaatcctccctaaccccgggtaggggccca

SEQ ID NO: 206 - DNA, 199 bp, Pepper mild mottle virus
  source 1..199: mol_type = other DNA
acatgatggcataaataagttgaacgaacattaaacgtccgtggcgagtacgataactcgtagtgtttttccctccacttaaatcgaagggttgtcgttgggatggaacgcaattaaatacatgtgtgacgtgtatttgcgaacgacgtaattatttttcaggggttcgaatcccccccgaaccgcgggtagcggccca

SEQ ID NO: 207 - DNA, 255 bp, Turnip crinkle virus
  source 1..255: mol_type = other DNA
tacggtaatagtgtagtcttctcatcttagtagttagctctctcttatattaagaaaagaaaacaaaaacccccaggtcgctttattttgacctgtgttagggaccaaaaacggtggcagcactgtctagctgcgggcattagactggaaaactagtgctctttgggtaaccactaaaatcccgaaagggtgggctgtggtgaccttccgaactaaaagatagcctccctcctcgcgcggggggggggcctgccc

SEQ ID NO: 208 - DNA, 370 bp, Tomato bushy stunt virus
  source 1..370: mol_type = other DNA
gacagactcttcagtctgagtttgtggagatgagtgtaaatctggcatagcatacaggttactcttgttgggttctggatgttaggatgacgagtcgactcgggctccgcactaggtttggtcgcctaggggatggagatatggaaagggtctcgtgtggtatcagtcggtcgaaagacgcgcttccaacatgggcctatggtcggataagtcttagcaataccagccagcatgaattggattcctgtttacgaaagttaggtgtcacttgtggaagcggacccagacacggttgatctcacccttcggggggctatagagatcgctggaagcactaccggacaaccggaacattgcagaaatgcagccc

SEQ ID NO: 209 - DNA, 241 bp, Tomato spotted wilt virus
  source 1..241: mol_type = other DNA
attaatagtaatgctcaacaatgcatggataatggattagatagaacttagaatacaaatttattgttattttagaattaggttagatctgattagactaaagacgatttggtgaaccaaatctatagtgtatgtaaatgtggagtcccggtatagtttcactggagggaattcttatatatcttatttgtaaagtctggttatggagagattatatgttttagttgtacctgattgctct

SEQ ID NO: 210 - DNA, 215 bp, Watermelon bud necrosis virus
  source 1..215: mol_type = other DNA
ataagccatagaatagacagtatagaaccagaagcagtaaaagagcatgacaacaaaagggttttttcttttgcaaaaggatgaaagtattctaaatcagtttaaaatgcaatgtagttgtagtatctagaatcaacagtagagtcagaaatagtatttcttaataaaattgagactgagtgtagaatacttttgttttgttgctcgattgctct

SEQ ID NO: 211 - DNA, 105 bp, Turnip yellow mosaic virus
  source 1..105: mol_type = other DNA
gttctcgatctttaaaatcgttagctcgccagttagcgaggtctgtccccacacgacagataatcgggtgcaactcccgcccctcttccgagggtcatcggaacc

SEQ ID NO: 212 - DNA, 4851 bp, Tobacco mosaic virus
  source 1..4851: mol_type = other DNA
atggcatacacacagacagctaccacatcagctttgctggacactgtccgaggaaacaactccttggtcaatgatctagcaaagcgtcgtctttacgacacagcggttgaagagtttaacgctcgtgaccgcaggcccaaggtgaacttttcaaaagtaataagcgaggagcagacgcttattgctacccgggcgtatccagaattccaaattacattttataacacgcaaaatgccgtgcattcgcttgcaggtggattgcgatctttagaactggaatatctgatgatgcaaattccctacggatcattgacttatgacataggcgggaattttgcatcgcatctgttcaagggacgagcatatgtacactgctgcatgcccaacctggacgttcgagacatcatgcggcacgaaggccagaaagacagtattgaactatacctttctaggctagagagaggggggaaaacagtccccaacttccaaaaggaagcatttgacagatacgcagaaattcctgaagacgctgtctgtcacaatactttccagacaatgcgacatcagccgatgcagcaatcaggcagagtgtatgccattgcgctacacagcatatatgacataccagccgatgagttcggggcggcactcttgaggaaaaatgtccatacgtgctatgccgctttccacttctctgagaacctgcttcttgaagattcatacgtcaatttggacgaaatcaacgcgtgtttttcgcgcgatggagacaagttgaccttttcttttgcatcagagagtactcttaattattgtcatagttattctaatattcttaagtatgtgtgcaaaacttacttcccggcctctaatagagaggtttacatgaaggagtttttagtcaccagagttaatacctggttttgtaagttttctagaatagatacttttcttttgtacaaaggtgtggcccataaaagtgtagatagtgagcagttttatactgcaatggaagacgcatggcattacaaaaagactcttgcaatgtgcaacagcgagagaatcctccttgaggattcatcatcagtcaattactggtttcccaaaatgagggatatggtcatcgtaccattattcgacatttctttggagactagtaagaggacgcgcaaggaagtcttagtgtccaaggatttcgtgtttacagtgcttaaccacattcgaacataccaggcgaaagctcttacatacgcaaatgttttgtcctttgtcgaatcgattcgatcgagggtaatcattaacggtgtgacagcgaggtccgaatgggatgtggacaaatctttgttacaatccttgtccatgacgttttacctgcatactaagcttgccgttctaaaggatgacttactgattagcaagtttagtctcggttcgaaaacggtgtgccagcatgtgtgggatgagatttcgctggcgtttgggaacgcatttccctccgtgaaagagaggctcttgaacaggaaacttatcagagtggcaggcgacgcattagagatcagggtgcctgatctatatgtgaccttccacgacagattagtgactgagtacaaggcctctgtggacatgcctgcgcttgacattaggaagaagatggaagaaacggaagtgatgtacaatgcactttcagagttatcggtgttaagggagtctgacaaattcgatgttgatgttttttcccagatgtgccaatctttggaagttgacccaatgacggcagcgaaggttatagtcgcggtcatgagcaatgagagcggtctgactctcacatttgaacgacctactgaggcgaatgttgcgctagctttacaggatcaagagaaggcttcagaaggtgctttggtagttacctcaagagaagttgaagaaccgtccatgaagggttcgatggccagaggagagttacaattagctggtcttgctggagatcatccggagtcgtcctattctaagaacgaggagatagagtctttagagcagtttcatatggcaacggcagattcgttaattcgtaagcagatgagctcgattgtgtacacgggtccgattaaagttcagcaaatgaaaaactttatcgatagcctggtagcatcactatctgctgcggtgtcgaatctcgtcaagatcctcaaagatacagctgctattgaccttgaaacccgtcaaaagtttggagtcttggatgttgcatctaggaagtggttaatcaaaccaacggccaagagtcatgcatggggtgttgttgaaacccacgcgaggaagtatcatgtggcgcttttggaatatgatgagcagggtgtggtgacatgcgatgattggagaagagtagctgtcagctctgagtctgttgtttattccgacatggcgaaactcagaactctgcgcagactgcttcgaaacggagaaccgcatgtcagtagcgcaaaggttgttcttgtggacggagttccgggctgtgggaaaaccaaagaaattctttccagggttaattttgatgaagatctaattttagtacctgggaagcaagccgcggaaatgatcagaagacgtgcgaattcctcagggattattgtggccacgaaggacaacgttaaaaccgttgattctttcatgatgaattttgggaaaagcacacgctgtcagttcaagaggttattcattgatgaagggttgatgttgcatactggttgtgttaattttcttgtggcgatgtcattgtgcgaaattgcatatgtttacggagacacacagcagattccatacatcaatagagtttcaggattcccgtaccccgcccattttgccaaattggaagttgacgaggtggagacacgcagaactactctccgttgtccagccgatgtcacacattatctgaacaggagatatgagggctttgtcatgagcacttcttcggttaaaaagtctgtttcgcaggagatggtcggcggagccgccgtgatcaatccgatctcaaaacccttgcatggcaagatcctgacttttacccaatcggataaagaagctctgctttcaagagggtattcagatgttcacactgtgcatgaagtgcaaggcgagacatactctgatgtttcactagttaggttaacccctacaccagtctccatcattgcaggagacagcccacatgttttggtcgcattgtcaaggcacacctgttcgctcaagtactacactgttgttatggatcctttagttagtatcattagagatctagagaaacttagctcgtacttgttagatatgtataaggtcgatgcaggaacacaatagcaattacagattgactcggtgttcaaaggttccaatctttttgttgcagcgccaaagactggtgatatttctgatatgcagttttactatgataagtgtctcccaggcaacagcaccatgatgaataattttgatgctgttaccatgaggttgactgacatttcattgaatgtcaaagattgcatattggatatgtctaagtctgttgctgcgcctaaggatcaaatcaaaccactaatacctatggtacgaacggcggcagaaatgccacgccagactggactattggaaaatttagtggcgatgattaaaaggaactttaacgcacccgagttgtctggcatcattgatattgaaaatactgcatctttagttgtagataagttttttgatagttatttgcttaaagaaaaaagaaaaccaaataaaaatgtttctttgttcagtagagagtctctcaatagatggttagaaaagcaggaacaggtaacaataggccagctcgcagattttgattttgtagatttgccagcagttgatcagtacagacacatgattaaagcacaacccaagcaaaaattggacacttcaatccaaacggagtacccggctttgcagacgattgtgtaccattcaaaaaagatcaatgcaatatttggcccgttgtttagtgagcttactaggcaattactggacagtgttgattcgagcagatttttgtttttcacaagaaagacaccagcgcagattgaggatttcttcggagatctcgacagtcatgtgccgatggatgtcttggagctggatatatcaaaatacgacaaatctcagaatgaattccactgtgcagtagaatacgagatctggcgaagattgggttttgaagacttcttgggagaagtttggaaacaagggcatagaaagaccaccctcaaggattataccgcaggtataaaaacttgcatctggtatcaaagaaagagcggggacgtcacgacgttcattggaaacactgtgatcattgctgcatgtttggcctcgatgcttccgatggagaaaataatcaaaggagccttttgcggtgacgatagtctgctgtactttccaaagggttgtgagtttccggatgtgcaacactccgcgaatcttatgtggaattttgaagcaaaactgtttaaaaaacagtatggatacttttgcggaagatatgtaatacatcacgacagaggatgcattgtgtattacgatcccctaaagttgatctcgaaacttggtgctaaacacatcaaggattgggaacacttggaggagttcagaaggtctctttgtgatgttgctgtttcgttgaacaattgtgcgtattacacacagttggacgacgctgtatgggaggttcataagaccgcccctccaggttcgtttgtttataaaagtctggtgaagtatttgtctgataaagttctttttagaagtttgtttatagatggctctagttgttaa

SEQ ID NO: 213 - DNA, 4851 bp, Tomato mosaic virus
  source 1..4851: mol_type = other DNA
atggcatacacacaaacagccacatcgtccgctttgcttgagaccgtccgaggtaacaataccttggtcaacgatcttgcaaagcggcgtctatatgacacagcggtagatgaatttaatgctagggaccgcaggcctaaagtcaatttttccaaagtagtaagcgaagaacagacgcttattgcaaccaaagcctacccagaattccaaattacattctacaacacgcagaatgctgtgcattcccttgcaggcggtctccgatcattagaattggaatatctgatgatgcaaattccctacggatcattgacatatgatatcggaggtaattttgcatctcatctgttcaaagggcgagcatacgttcactgctgtatgccgaatctagatgtccgcgacataatgcggcacgagggccaaaaggacagtattgaactatacctttctaggctcgagaggggcaacaaacatgtcccaaacttccaaaaggaagctttcgacagatacgctgaaatgccaaacgaagtagtctgtcacgatactttccaaacgtgtaggcattctcaagaatgttacacgggaagagtgtatgctattgctttgcatagtatatacgatatacctgccgacgagttcggcgcggcactgctgagaaagaatgtacatgtatgttatgccgctttccacttttccgagaatttacttctcgaagattcacacgtcaacctcgatgagatcaatgcatgtttccaaagagatggagacaggttgactttttcctttgcatctgagagtactcttaattatagtcatagttattctaatattcttaagtatgtttgcaaaacttacttcccagcctctaatagagaggtttacatgaaggagtttttagtaactagagttaatacctggttttgtaaattttctagaatagatactttcttattgtacaaaggtgtagcgcataagggtgtagatagtgagcagttttacaaggctatggaagacgcatggcactacaaaaagactcttgcgatgtgcaacagtgaaagaatcttgttagaggattcttcatcagttaattactggtttccaaaaatgagggatatggtgatagttccactatttgacatatctctcgagactagtaaaagaacacgcaaagaggtcttagtttcaaaggactttgtttatacagtgttaaatcacattcgtacgtaccaggccaaagcgcttacttactccaacgtgttatctttcgtcgaatcaattcgttcgagagtgatcattaacggggttactgccaggtctgagtgggatgtcgataaatcattattacagtccttgtcgatgacgttcttcctacataccaagcttgccgttctgaaagacgatcttttgattagcaagtttgcacttggaccaaaaactgtctcacaacatgtgtgggatgagatttccctagctttcggcaatgctttcccatcgatcaaggaaagattgataaaccggaaactgatcaaaattacggagaatgcgttagagatcagggtgcccgatctttatgtcactttccatgataggttagtttctgagtacaaaatgtcagtggacatgccggtgctagacattaggaaaaagatggaagaaactgaggaaatgtacaatgcactgtccgaactgtctgtacttaaaaattcagacaagttcgatgttgatgttttttcccagatgtgccaatctttagaagttgatccaatgactgcagcaaaggtaatagtagcagttatgagcaacgagagtggtcttactctcacgtttgaacagcccaccgaagctaatgttgcgctagcattgcaagattctgaaaaggcttctgatggggcgttggtagttacctcaagagatgttgaggaaccgtccataaagggttcgatggcccgtggtgagttacaattggccggattatctggcgacgttcctgaatcttcatacactaggagcgaggagattgagtctctcgagcagtttcatatggcaacagctagttcgttaattcataagcagatgtgttcgatcgtgtacacgggccctcttaaagttcaacaaatgaaaaactttatagacagcctggtagcctcgctctctgctgcggtgtcgaatctagtgaagatcctaaaagatacagccgcgattgaccttgaaactcgtcaaaagttcggagttctggatgttgcttcgaaaaggtggctagttaaaccatccgcaaagaaccatgcatggggggttgttgagactcatgcgaggaaatatcacgtcgcattactggagcacgatgaatttggcattattacgtgcgataactggcgacgggtggctgtgagttctgagtcggtagtatattctgatatggctaaactcaggactctgagaagattgctcaaagatggagaaccacacgttagttcagcaaaggtggttttggtggatggcgttccagggtgcgggaagacaaaggaaattctttcgagagttaatttcgaagaagatctaattcttgtccctggtcgtcaagctgccgagatgatcagaagaagagctaatgcgtcgggcataatagtggctacaaaggataatgtgcgcaccgtcgattcatttttgatgaattacgggaaaggggcacgctgtcagttcaaaagattgttcatagacgaaggtttgatgctgcatactggttgtgtgaatttcttggttgaaatgtctctgtgcgatattgcatatgtttatggagacacccaacaaattccgtacatcaacagagtaactggtttcccgtaccctgcgcactttgcaaaattggaggtcgacgaagtcgaaacaagaagaactactcttcgctgtccggctgatgtcacacacttcctaaatcaaaggtatgaaggacacgtaatgtgcacgtcttctgaaaagaaatcagtttcccaggaaatggttagtggggctgcgtctatcaatcctgtgtccaagccgcttaaagggaaaattttgactttcacacagtctgacaaggaggcccttctctcaaggggctacgcagatgtccatactgtacatgaggtacaaggtgagacttatgcagacgtatcgttagttcgactaacacctacgcctgtatctatcatcgcaagagacagtccgcatgttctggtctcgttgtcaagacacacaaaatccctaaagtactacaccgttgtgatggatcctttagttagtatcattagagatttagaacgggttagtagttacttattagacatgtacaaagtagatgcaggtactcaatagcaattacaggtcgactctgtgtttaaaaatttcaatctttttgtagcagctccaaagactggagatatatctgatatgcaattttactatgataagtgtcttcctgggaacagcacgttgttgaacaactacgacgctgttaccatgaaattgactgacatttctctgaatgtcaaagattgcatattagatatgtctaagtctgtagctgctccgaaagatgtcaaaccaactttaataccgatggtacgaacggcggcagaaatgcctcgccagactggactgttggaaaatctagttgcgatgattaaaagaaattttaattcaccagagttgtccggagtagttgatattgaaaatactgcatctttagtggtagataagttttttgatagttatttacttaaggaaaaaagaaaaccaaacaaaaatttttcactgtttagtagagagtctctcaataggtggatagcaaagcaagaacaagtcacaattggtcagttggccgattttgattttgtggatcttccagccgttgatcagtacaggcatatgattaaagcgcaaccgaagcagaaactggatctgtcaattcagacagaatatccagcgttgcaaacgattgtgtatcattcaaagaaaatcaacgcaatatttggtcctcttttcagtgagcttacaaggcaattacttgacagtattgactcaagcagattcttgttctttacgagaaagacaccggctcagatcgaagatttcttcggagatctagacagtcatgtcccaatggacgtacttgagttggatgtttcgaagtatgataagtctcaaaacgagtttcattgtgctgttgagtacgaaatctggaggagactgggtctggaggatttcttggcagaagtgtggaaacaagggcatagaaaaaccaccctgaaagattacactgctggtataaaaacgtgtttatggtaccagagaaagagtggtgatgttacaacttttatcggtaataccgtcatcattgcttcgtgtcttgcatcaatgctcccgatggaaaaattgataaaaggagccttctgcggagatgacagtttgttgtactttcctaagggttgtgagtatcccgatatacaacaagctgccaatctaatgtggaattttgaggccaaactgttcaagaagcaatatgggtacttctgcgggaggtacgtgattcatcacgatagaggttgcatagtatactacgaccctttgaagctgatttcgaaacttggtgctaaacacatcaaggattgggatcatttggaggagttcagaagatccctctgtgatgttgctgagtcgttgaacaattgcgcgtattacacacaattggacgacgctgttggggaggttcataaaaccgccccacctggttcgtttgtttataagagtttagttaagtatttgtcagataaagttttgtttagaagtttatttcttgatggctctagttgttaa

SEQ ID NO: 214 - DNA, 4806 bp, Turnip vein-clearing virus
  source 1..4806: mol_type = other DNA
atggcacaatttcaacaaacaattgacatgcaaactctccaagccgctgcgggacgcaacagcttggtgaatgatttggcatctcgtcgcgtttacgataatgcagtcgaggagctgaatgctcgttccagacgtcccaaggttcatttctccaaggcagtgtctacggaacagacactgattgcaacaaacgcatatccggagttcgagatttcctttactcatacgcaatccgctgtgcactccttggccggaggccttcggtcacttgagttggagtatctcatgatgcaagttccgttcggttctctgacgtacgacatcggcggtaacttttccgcgcaccttttcaaagggcgcgattacgttcactgctgcatgcctaatctggatgtacgtgacattgctcgccatgaaggacacaaggaagctatttacagttatgtgaatcgtttgaaaaggcagcagcgtcctgtgcctgaataccagagggcagctttcaacaactacgctgagaacccgcacttcgtccattgcgacaaacctttccaacagtgtgaattgacgacagcgtatggcactgacacctacgctgtagctctccatagcatttatgatatccctgttgaggagttcggttctgcgctactcaggaagaatgtgaaaacttgtttcgcggcctttcatttccatgagaatatgcttctagattgtgatacagtcacactcgatgagattggagctacttttcagaagtccggtgataatttaagttttttctttcataatgagagcactctcaattacacccacagttttagtaatataattaagtatgtgtgtaaaacgttctttcctgctagtcaacggtttgtgtatcataaggagtttttagttactagagtcaacacttggtactgtaagtttacgagagtggatacttttactcttttccgtggtgtgtaccataataatgtggattgcgaagagttttacaaggctatggacgatgcgtggcactacaaaaagacgttagcaatgcttaatgccgagaggaccatcttcaaggataacgctgcgttaaacttttggttcccgaaagtgagagacatggttatcgtccctctctttgacgcttctatcacaactggtaggatgtctaggagagagattatggtgaacaaggatttcgtttatacggtcctaaatcacataaaaacgtatcaagctaaggctttaacttacgcaaatgttctgtcctttgtggagtctattaggtctagagtgataattaacggtgtcactgccaggtctgaatgggacacagacaaggcaattctaggtccattagcaatgacatttttccttataacaaagttgggtcatgtgcaggatgaaataatcctgaaaaagttccagaagttcgacagaaccaccaatgagctgatttggacaagtctctgcgatgccctgatgggggttattccctcggtcaaggagacgcttgtgcgcggtggttttgtgaaagtagcagaacaagccttagagataaaggttcccgagctatactgtacctttgccgacagattggtactacagtacaagaaggcggaggagttccaatcgtgtgatctttccaaacctctagaagagtcagagaagtactacaacgcattatccgagctatcagtgcttgagaatctcgactcttttgacttagaggcgtttaagactttatgtcagcagaagaatgtggacccggatatggcagcaaaggtggtcgtagcaatcatgaagtcagaattgacgttgcctttcaagaaacctacagaagaggaaatctcggagtcgctaaaaccaggagaggggtcgtgtgcagagcataaggaagtgttgagcttacaaaatgatgctccgttcccgtgtgtgaaaaatctagttgaaggttccgtgccggcgtatggaatgtgtcctaagggtggtggtttcgacaaattggatgtggacattgctgatttccatctcaagagtgtagatgcagttaaaaagggaactatgatgtctgcggtgtacacagggtctatcaaagttcaacaaatgaagaactacatagattacttaagtgcgtcgctggcagctacagtctcaaacctctgcaaggtgcttagagatgttcacggcgttgacccagagtcacaggagaaatctggagtgtgggatgttaggagaggacgttggttacttaaacctaatgcgaaaagtcacgcgtggggtgtggcagaagacgccaaccacaagttggttattgtgttactcaactgggatgacggaaagccggtttgtgatgagacatggttcagggtggcggtgtcaagcgattccttgatatattcggatatgggaaaacttaagacgctcacgtcttgcagtccaaatggtgagccaccggagcctaacgccaaagtaattttggtcgatggtgttcccggttgtggaaaaacgaaggagattatcgaaaaggtaaacttctctgaagacttgattttagtccctgggaaggaagcttctaagatgatcatccggagggccaaccaagctggtgtgataagagcggataaggacaatgttagaacggtggattccttcttgatgcatccttctagaagggtgtttaagaggttgtttatcgatgaaggactaatgctgcatacaggttgtgtaaatttcctactgctgctatctcaatgtgacgtcgcatatgtgtatggggacacaaagcaaattccgttcatttgcagagtcgcgaactttccgtatccagcgcattttgcaaaactcgtcgctgatgagaaggaggttagaagagttacgctcaggtgcccggctgatgttacgtatttccttaacaagaagtatgacggggcggtgatgtgtaccagcgcggtagagagatccgtgaaggcagaagtggtgagaggaaagggtgcattgaacccaataaccttaccgttggagggtaaaattttgaccttcacacaagctgacaagttcgagttactggagaagggttacaaggatgtgaacactgtgcacgaggtgcaaggggagacgtacgagaagactgctattgtgcgcttgacatcaactccgttagagatcatatcgagtgcgtcacctcatgttttggtggcgctgacaagacacacaacgtgttgtaaatattacaccgttgtgttggacccgatggtgaatgtgatttcagaaatggagaagttgtccaatttccttcttgacatgtatagagttgaagcgggggtccaatagcaattacagatcgatgcagtattcagggacagcaacttgtttgttcagacgcccaagtcaggagattggcgagatatgcaattttactatgacgctcttcttcccggaaacagtactattctcaatgaatttgatgctgttacgatgaatttgagggatatttccttaaacgtcaaagattgcagaatcgacttctccaaatccgtgcaacttcctaaagaacaacctattttcctcaagcctaaaataagaactgcggcagaaatgccgagaactgcaggtttgctggaaaatttggttgcaatgatcaaaagaaacatgaatgcgccggatttgacagggacaattgacattgaggatactgcatctctggtggttgaaaagttttgggattcgtatgttgacaaggaatttagtggaacgaacgaaatgaccatgacaagggaaagtttttctagatggctttcgaaacaagagtcatctacagttggtcagttagcggactttaactttgtggatttgccggcagtagatgagtacaagcatatgatcaagagtcaaccaaagcaaaagttagacttgagtattcaagacgaatatcctgcattgcagacgatagtctaccattcgaaaaagatcaatgcgattttcggtccaatgttttcagaacttacgaggatgttactcgaaaggattgactcttcgaagtttctgttctacaccagaaagacacctgcacaaatagaggacttcttttctgacctagactcaacccaggcgatggaaattctggaactcgacatttcgaagtacgataagtcacaaaacgagttccattgtgctgtagagtacaagatctgggaaaagttaggaattgatgagtggctagctgaggtatggaaacaaggacacagaaaaacgaccttgaaagattatacggccggagtcaaaacatgtctttggtatcaaaggaaaagtggtgatgtgacaacctttattggtaataccatcatcattgcagcctgtttgagctcaatgatccccatggacaaagtgataaaggcagctttttgtggagacgatagcctgatttacattcctaaaggtttagacttgcctgatattcaggcgggcgcgaacctcatgtggaacttcgaggccaaactcttcaggaagaagtatggttacttctgtggtcgttatgttattcaccatgatagaggagccattgtgtattacgatccgcttaaactaatatctaagttaggttgtaaacatattagagatgttgttcacttagaagagttacgcgagtctttgtgtgatgtagctagtaacttaaataattgtgcgtatttttcacagttagatgaggccgttgccgaggttcataagaccgcggtaggcggttcgtttgctttttgtagtataattaagtatttgtcagataagagattgtttagagatttgttctttgtttga

SEQ ID NO: 215 - DNA, 4839 bp, Pepper mild mottle virus
  source 1..4839: mol_type = other DNA
atggcttacacacaacaagctaccaacgccgcattagcaagtactctccgagggaataaccccttggtgaacgatcttgctaatcggagactgtacgaatcagcggtcgaacaatgcaatgcacatgaccgcaggcccaaggttaattttttaaggtcgataagcgaagagcagacgcttatcgcaactaaggcctaccctgagttccaaatcacgttctacaacacgcagaacgctgtgcacagtctcgcaggtggacttcggtctttggaactagaatacttgatgatgcagatcccctacggttcaacgacatatgatatcgggggaaattttgctgctcacatgtttaaaggtcgtgactacgttcattgctgcatgcctaacatggacttacgtgacgtcatgcgtcacaatgctcaaaaggatagcattgaactgtacctttcaaagcttgcgcaaaagaaaaaggtaataccgccatatcaaaagccatgctttgataaatacacggacgatccgcaatcagtagtgtgctcgaaaccttttcagcactgcgaaggcgtttcgcactgcacggataaagtatacgctgtcgctttgcacagtttatacgacattccagcagatgaatttggggcagcacttctgaggagaaatgttcatgtctgctatgctgccttccacttttctgagaatcttcttttagaagattcgtatgtcagtcttgacgacataggcgctttcttctcgagagagggcgatatgttgaacttttcttttgtagcagagagtactttaaattatactcattcctatagtaatgtgcttaagtatgtgtgtaagacttacttccccgcttctagtagagaagtgtacatgaaggagtttttggtaactagggtaaatacttggttttgtaagttttcaaggttagatacctttgtactatatagaggtgtataccacagaggtgtagacaaggagcaattttacagtgcaatggaagatgcttggcattacaaaaagactttggcgatgatgaatagcgaaagaatcctcttagaggattcatcgtctgttaattattggtttccaaagatgaaagatatggtgatagtacctttgttcgacgtatctttacagaacgaggggaaaaggttagcaagaaaggaggtcatggtcagcaaggacttcgtttatactgtgcttaatcatattcgcacataccagtcgaaagcgcttacttacgccaatgtattatcgttcgttgagtcgataagatcaagagtgataatcaatggggtgactgcgcgctcagagtgggatgtggataaggctttgttgcagtccctgtcaatgacttttttcttgcagaccaaattggccatgctcaaggatgacctcgtggttcagaaattccaagtgcattccaaatcgctcactgaatatgtctgggatgagattactgctgcttttcacaattgttttcctacaatcaaggagaggttgattaacaagaaactcataactgtttcggaaaaggctcttgaaattaaagtacctgatttgtatgtaactttccacgatagattggttaaggagtacaagtcttcggtggaaatgccggtactggacgttaaaaagagcttggaagaagcagaagtgatgtacaatgctttgtcagaaatctcaattcttaaagacagtgacaagtttgatgttgatgttttttcccggatgtgtaatacattaggcgtagatccattggtggcagcaaaggtaatggtagctgtggtttcaaatgagagtggtttgaccttaacgtttgagaggcctaccgaagcaaatgtcgcacttgcattgcaaccgacaattacatcaaaggaggaaggttcgttgaagattgtgtcgtcagacgtaggtgagtcctcaatcaaggaagtggttcgaaaatcagagatttctatgcttggtctaacaggcaacacagtgtccgatgagttccaaagaagtacagaaatcgagtcgttgcagcagttccatatggtatccacagagacgattatccgtaaacagatgcatgcgatggtgtatactggtccgctaaaagttcaacaatgcaagaactatttagacagcctggtagcctcgctctctgctgcggtatcaaacctgaagaagataatcaaagacacagctgctatagatctcgagactaaggaaaaatttggagtctacgacgtgtgccttaagaaatggttggtgaaacctctatcaaaaggacatgcttggggtgtggtgatggactcagactataagtgctttgttgcgcttctcacatacgatggcgagaacattgtgtgcggagagacatggcgtagagtcgcagtgagctccgaatctttggtgtattcagatatggggaagataagagctatacgctctgtgcttaaagacggtgaaccccatataagcagtgcaaaggttacacttgttgatggtgttcctggttgcggaaagacaaaggagattctttcgagggtcaactttgacgaagatctagttctggtaccaggaaaacaggctgctgaaatgataagaagaagggcaaacagttctggtttaatcgtggcgaccaaggagaatgtaaggacggtagactctttcttaatgaattacggtcgaggtccgtgccaatacaaaaggctgtttctggatgaaggtctaatgttacaccctggttgtgttaattttctggttggcatgtctctatgctccgaggcttttgtttatggagacacccagcagattccttacatcaacagagttgcaacttttccctatcctaagcatttgagtcaactcgaggtcgatgctgttgaaactcgcagaacaacgttgcggtgtccagctgatatcaccttcttcttgaatcagaagtacgaagggcaagttatgtgcacatcaagtgttacacgctcggtgtcacacgaggtcatccaaggtgcagcggtaatgaatccagtgtctaaaccacttaaagggaaggtgattacattcactcagtcagacaagtcattgctgctctcgaggggttacgaagatgtgcataccgttcatgaggtgcaaggggaaacgtttgaagacgtctcactagtgaggctgacgccaacacccgtgggaataatttcaaagcagagtccgcacctgttggtctcattgtctaggcatacaaggtcgatcaaatattacacagttgtgctagatgcagtcgtttcagtgcttagagatctggagtgtgtgagtagttacctgttagatatgtacaaagttgatgtgtcgactcaatagcaattacagatagaatcggtgtacaaaggtgttaaccttttcgtcgcagcaccaaaaacaggagatgtttctgacatgcaatattattacgacaagtgtttgccgggaaacagtactatactcaatgagtatgatgctgtaactatgcaaatacgagagaatagtttgaatgtcaaggattgtgtgttggatatgtcgaaatcggtgcctcttccgagagaatctgagacgacattgaaacctgtgatcaggactgctgctgaaaaacctcgaaaacctggattgttggaaaatttggtcgcgatgatcaaaagaaatttcaactctcccgaattagtaggggttgttgacatcgaagacaccgcttctctagtagtagataagttttttgatgcatacttaattaaagaaaagaaaaaaccaaaaaatatacctctgctttcaagggcgagtttggaaagatggatcgaaaagcaagagaagtcaacaattggccagttggctgattttgactttattgatttaccagccgttgatcaatacaggcacatgatcaagcagcagccgaaacagcgtttggatcttagtattcaaactgaatacccggctttgcaaactattgtgtatcatagcaagaaaatcaatgcgctttttggtcctgtattttcagaattaacaagacagctgctagagacaattgacagttcaagattcatgttttatacaaggaaaacgcctacacagatcgaagaatttttctcagatctggactctaatgttcctatggacatattagagctagacatttccaagtatgacaaatcacagaacgaatttcattgtgcagtcgagtatgagatttggaaaaggttaggcttagacgatttcttggctgaagtttggaaacacgggcatcggaagacaacgttgaaagactacacagccggaataaaaacgtgtttgtggtaccagaggaaaagcggtgatgtcaccacattcattggaaacacgatcattattgctgcatgtctgtcctctatgctaccgatggagagattgattaaaggtgccttttgtggtgatgatagtatattatactttccaaagggcactgatttccccgatattcaacagggcgcaaaccttctctggaattttgaagccaagttgtttaggaagagatatggttacttttgcggtaggtacataattcaccatgacagaggctgtattgtatattatgaccctctaaaattgatctcgaaactcggtgcaaaacacatcaagaatagagaacatttagaggaatttaggacctctctttgtgatgttgctgggtcgttgaacaattgtgcgtactatacacatttgaacgacgctgtcggtgaggttattaagaccgcacctcttggttcgtttgtttatagagcattagttaagtacttgtgtgataaaaggttatttcaaacattgtttttggagtaa

SEQ ID NO: 216 - DNA, 2391 bp, Turnip crinkle virus
  source 1..2391: mol_type = other DNA
atgcctcttctacacacactcaacacagcgctcgcagtgggactcctaggagccaggtactaccctgaggttcaaaccttcttggggctgcctgactacgtgggtcacatgaagaatgtagtacggtctgttttccagggatctgggctagtagtagtgtcctccgacacagtcggtgtcagggggacgtatagtaatagaggtcagataggtagtagtctcgggtgtatactagccgttccggatagcggggcggatatagaaatagacttagataggttggtaggaacggaagaggaagccacatcctgtttggtggaggcggtaggtagtaccgcagatgtccccaggaggagagttcgtcaaaaggggcggtttgccatgcatgccgtcaacgcagcaaagctgcacttttgtggcgtcccaaaacccactgaagcgaatcgactagcggtctcaaaatggcttgtccaatactgcaaagagagacatgtcgtagacagccacatcagaacgatagtcaatacggctcttcctagagtgttcacgcctgacgcggaagacattcaggtcgtgctggatttgcacagtgtaagagcacacgaccaccgcaacgccctagccgaagcaggcaaagtgcggaagtggtgggtcaatctcgcgatgcatcccatgactgggaggtcgtggtccagggcttggaggcgattatgccgactgcctgacgaccaggcgatctcttttgtccgctaggggtgcttgcgggagctggtcgggagggagactcaaatctccaggggtgaaaacccggccatgcgcgtgttcccgttagcaaatcccccgaaggttcgacgcatcttccatatctgtggaatgggcaatggtttagactttggagtccacaacaactcactcaacaatttgagaagagggttgatggaaagagtcttttacgttgaagatgcgcagaagcaattgaaaccagccccccaaccgatcccagggattttcgggaagttgagtgggattcggagacgattggtcaggttggccggaaatcatacccctgtgcctcgggagaaatacccgtcgttctacaagggcaggagggccaccatataccaaaaggctttggattctctacatgacagaccggtatcccggaaggacgcagaactcaaaacattcgtgaaggcagaaaagatcaatttcacggctaagaaagacccggctccacgggtcatccagccgagggacccacgatataatattgaggttgggaaatacttgaaaccgtacgagcaccatttatatcgggcaattgacgctatgtggggtgggcccactgtgctgaaaggatacgatgtgggggagcttggaaacattatgagtaacacctgggataaattccggaaaacgtgtgcgataggatttgacatgaagagattcgaccagcacgtatccgtggacgccctacgatgggaacacagtgtatacaacgcgggctttaactgtcccgagttggcacagctgctaacttggcagttgaccaacaagggggttgggagagcctccgatggctttatcaaataccaagttgatggttgtcgcatgtccggagatgttaacacagccttgggcaactgcctactggcttgctctatcaccaagtacttaatgaagggaatcaaatgcaaattaatcaacaatggagacgattgtgtgctgttcttcgaagctgatgaagtcgacagggtgcgcgaaaggctgcatcattggatcgactttgggtttcaatgcatagcggaagaaccacaatacgaattggagaaagttgaattttgccagatgtcccctattttcgatggtgaagggtgggtcatggtcagaaacccccgtgtgagcctctccaaggacagctacagcaccacacaatgggcgaatgagaaagatgcagccagatggttggctgccatcggagagtgtggcttggctattgcaggtggcgtaccagtgttacaatcatattattcttgcctgaagaggaattttggacccctggccggggactacaagaagaagatgcaagatgtttcctttgatagtggattctacaggttatccaagaacgggatgaggggcagcaaagacgtgtcccaagatgctaggttcagcttttaccgggggttcggctacactccagacgagcaggaagcgcttgaggagtactacgacaacctcgaactgctctgtgagtgggaccccacgggatataaagaagaacttagtgatagatggatcctgaacgaattccctacaactctctaagcgacagcgacgcaacaggaaaacggaagaaaggcggagagaaaagtgcgaagaagagattgg

SEQ ID NO: 217 - DNA, 816 bp, Turnip crinkle virus
  source 1..816: mol_type = other DNA
atgcctcttctacacacactcaacacagcgctcgcagtgggactcctaggagccaggtactaccctgaggttcaaaccttcttggggctgcctgactacgtgggtcacatgaagaatgtagtacggtctgttttccagggatctgggctagtagtagtgtcctccgacacagtcggtgtcagggggacgtatagtaatagaggtcagataggtagtagtctcgggtgtatactagccgttccggatagcggggcggatatagaaatagacttagataggttggtaggaacggaagaggaagccacatcctgtttggtggaggcggtaggtagtaccgcagatgtccccaggaggagagttcgtcaaaaggggcggtttgccatgcatgccgtcaacgcagcaaagctgcacttttgtggcgtcccaaaacccactgaagcgaatcgactagcggtctcaaaatggcttgtccaatactgcaaagagagacatgtcgtagacagccacatcagaacgatagtcaatacggctcttcctagagtgttcacgcctgacgcggaagacattcaggtcgtgctggatttgcacagtgtaagagcacacgaccaccgcaacgccctagccgaagcaggcaaagtgcggaagtggtgggtcaatctcgcgatgcatcccatgactgggaggtcgtggtccagggcttggaggcgattatgccgactgcctgacgaccaggcgatctcttttgtccgctaggggtgcttgcgggagctggtcgggagggagactcaaatctccaggggtgaaaacccggccatg

SEQ ID NO: 218 - DNA, 2457 bp, Tomato bushy stunt virus
  source 1..2457: mol_type = other DNA
atggagaccatcaagagaatgatttggcctaagaaagagatttttgtgggtgatttcgcaaccggagtgaataggacagttccggtgaacatctttcaattggtgtgtcgtgtggttctgagatacatgaggacagggaaaatagagtgtgattctgacagcatgactaagtttatagttgaattactcaaaactgattgtgctgccaaatgggaatggttcatgaagagacggcagaggggtgattacattgtccctctatctatagcctccataccaatcataccgctgttgagttatgccactagggtacgcgcagtctcagtcaaggcttttggcaatgaactatcgttcaatgtcagggtgcctagaccatctgtacctaagaaaggattgctcctcagactggcggcaggtctagcgttagctcctatatgcgcgctggccgtgtacgctaccctacctagggaaaaactgtcggtatttaagctgagaactgaggcacgagcacacatggaggatgagagagaagcgacagattgtctggtggttgagccggcaagggaacttaagggtaaagatggtgaggatctcctcactggtagtagattgactaaggtgatcgcgtccactgggcgccctcgtcgaagaccttatgcggcaaagatcgcacaggtggcgagagcaaaggtgggttaccttaagaacagtccagagaatagactaatctaccagagggtgatgatcgagatcatggacaaagactgcgtcaggtatgttgacagggatgtcatattgcctttggctattggatgctgttttgtctatccggatggagtggaggagtcggcggcactatggggctcacaggagtccctgggtgtcaaatagggaggcctagtacgtctacctggggttgtaacacagatcaatcgagatatcccatctgatgtgttacttcctcaggaggtgctagaggttcgtacaggacctcccaatgctaaggaccgtaatatatttatggttgcaggttgcccatcacaggcacggttcttagtacataatcactgcctgaaaaaccttaaaaggggtcttgtggagagagtcttctgcgtagagagaaacgggaagctcgctcgcactccacaacctaccaaaggagcctttggacgtctttccccgttcaggaaagcggtttgtgagaaggttggggtagcccaccgacttgggtatgatgggtttctgtcatactacagcggtgcgaaactccgtacttacacacgagccgtggagagtctgcatatcacacctgtctccgagagggatagtcacttgactaccttcgtaaaagcagagaagatatcgacgtctaagggtgacccagcacctcgggtgattcagcctcgaaacccgaggtacaatgtggaacttggaagatatctacggcatatggaatccaagctgatgaaagctgttgatggcgtgttcggagagacgacatgcatcaaaggatacacagctgatgaggtaggtgcaattttccgggctaaatgggacaggtttgataagcctgtcgccatagggctcgatgcatctaggtttgatcaacactgttccgttgaagcattgcaatatgagcatagcttctacagggccatgtaccctggcaacaagctcttgggcaagttgttggaatggcagctccataataaaggtaaaggttatgttccagatggaactataacctatcgcaaggagggctgtcgcatgagtggggatataaacacctcgttgggcaactatctactgatgtgtgcaatggtacatgggtacatgcgtcatctggggattaatgagtttagtctggcaaactgtggggatgattgcgtcctaattgtcgaacgcaggaatcttaagcagatacagagaactttaccggagtatttcctcaatctgggatatactatgaaggtggagcaacctgtatttcaactggaagaggttgaattttgccaggcacacccagtacagtttcaaggcggttggaagatggttcgaaacgtccgtactgctatgagcaaggatgtgcactgtgtcaacaatatacgcgatttggcgacgaggagagcttggagtaatgctcaacatcatgggggtctagcgcttagtgctggtattccagttgtggagacgttttactctaggtttaagctttatgatgtacctcgtaaacatcaacgtattgacacggtcacaaatgtgcacaagtggcgtggatccggtgggagttatgttgtgacccctgaatctagggctagcttttgggctgcctttggactcacgggggatgagcaactggctctggaggaccgtctggaaagatgggagatggatctgtttggagaggagggtgttgacgctcatgagcccagcatcctcgactccgccgtagcttga

SEQ ID NO: 219 - DNA, 891 bp, Tomato bushy stunt virus
  source 1..891: mol_type = other DNA
atggagaccatcaagagaatgatttggcctaagaaagagatttttgtgggtgatttcgcaaccggagtgaataggacagttccggtgaacatctttcaattggtgtgtcgtgtggttctgagatacatgaggacagggaaaatagagtgtgattctgacagcatgactaagtttatagttgaattactcaaaactgattgtgctgccaaatgggaatggttcatgaagagacggcagaggggtgattacattgtccctctatctatagcctccataccaatcataccgctgttgagttatgccactagggtacgcgcagtctcagtcaaggcttttggcaatgaactatcgttcaatgtcagggtgcctagaccatctgtacctaagaaaggattgctcctcagactggcggcaggtctagcgttagctcctatatgcgcgctggccgtgtacgctaccctacctagggaaaaactgtcggtatttaagctgagaactgaggcacgagcacacatggaggatgagagagaagcgacagattgtctggtggttgagccggcaagggaacttaagggtaaagatggtgaggatctcctcactggtagtagattgactaaggtgatcgcgtccactgggcgccctcgtcgaagaccttatgcggcaaagatcgcacaggtggcgagagcaaaggtgggttaccttaagaacagtccagagaatagactaatctaccagagggtgatgatcgagatcatggacaaagactgcgtcaggtatgttgacagggatgtcatattgcctttggctattggatgctgttttgtctatccggatggagtggaggagtcggcggcactatggggctcacaggagtccctgggtgtcaaatag

SEQ ID NO: 220 - DNA, 8640 bp, Tomato spotted wilt virus
  source 1..8640: mol_type = other DNA
atgaacatccagaaaatacaaaaattaatagaaaatggaaccactttattgttatctattgaggattgtgtaggttctaaccatgatctggctttggatttacataagagaaatagtgatgagattccagaagatgtgattattaataataatgcaaaaaactatgagacgatgagagaattaattgtcaaaatcactgctgatggagaagggctaaacaaagggatggcaactgtggatgttaagaagctaggtgagatggtctctctgtttgagcaaaaatacttagaaacagagttagcaaggcatgatattttcggagagctgatctccagacacctaagaataaaacccaaacaaagaagcgaggtggagatagagcatgcactcagagaatatctggatgatctcaacaaaaagtcctgtgttaacaagctttctgatgatgagtttgagagaataaacaaagaatatgtggcaactaacgccacccctgataactatgtaatatataaagaatcaaaaaacagtgaactctgtttaatcatttatgattggaaaatatctgttgatgccaggactgaaaccaaaacaatggaaaaatactacaaaaatatctggaaatctttcaaagatataaaagtgaatggaaagccattcctagaagatcaccctgttttcgtttctattgttatattgaaacctattgctggaatgccaatcactgttactagcagtagggtattgggaaaatttgaagactctccatcagcattgcatggagaaagagtaaagcatgctagaaatgccaaactgctaaatatttcttatgttggaaaaatcgtaggaaccacgcccacagtggtgagaaactattatgcaaacactcagaaaatcaaatctgaagtcagaggaatcttaggtgatgattttggatccaaagatgtgttttttagtcactggactagcaaatacaaagagagaaatcctactgaaatagcctattctgaagatattgaaagaataattaactcacttgttacagaagaaatccctaaggaagagataatacattttttgtttggaaatttctgtttccacattgaaacgatgaatgaccagcatattgctgacaaatttaaagggtaccaaaactcttgtattaatttaaaaatagagccaaaagctgatttagctgatttgaaagaccacttgatccaaaaacagcaaatatgggaatctttgtatgggaaacaccttgagaagatcatgcttagaattagagaaaaaaagaaaaaagagaaagaaatacctgacataactacagcttttaaccagaatgccacagaatatgaagaaaagtatcctaactgttttacaaacgatctttctgaaactaaaactaacttttccatgacttggtccccaagttttgaaaaaattgaattgggctcagaagtagattacaataacgcaatcataaacaaatttcgggaaagcttcaaaagttcttcaagaattatttacaatagcccatatagtagcataaataaccaaacaaacaaagcaagagatataacaaacttggttagactgtgtttaacagagttaagttgtgatacaacaaaaatggaaaaacaggaacttgaggatgaaatagatataaacactgggagcattaaagttgagagaacaaaaaaatctaaagaatggagtaagcagggttcatgtttgaccaggaacaaaaatgaattttgcatgaaagagacaggcaaggagaacaaaactacctattttaaaggtttagcagtaatgaatataggaatgagctctaagaaaagaattctaaaaaaagaagaaataaaagaaaggatttctaaaggcctggaatatgatacctcagaaaggcaggctgacccaaatgatgattattcaagtatagacatgtcttctctgactcataggaaaaaactaattaggcacgacaatgaggacagcttaagctggtgtgaaagaattaaagattctttgtttattcttcataatggtgatataagagaggaaggcaagatcacatctgtttacaataattatgctaaaaatcccgaatgcttgtacattcaagattcagtattgaaagctgaactggagacttgtaaaaaaataaacaaattatgcaatgacctagccatttaccattactctgaagacatgatgcaattctccaaaggtttgatggtggcagacaggtatatgactaaagaaagtttcaagatactaactacagcaaatactagcatgttgctactggcatttaaaggagatggaatgaacaccggaggatcgggagttccttacatagcattgcacatagtggatgaagacatgtcagatcaatttaacatatgttatactaaagaaatttatagctatttccgaagtggtagtaattacatttatataatgagaccgcagagactcaaccaggtgaggctgctgagccttttcaaaacgcctagcaaagttcctgtatgttttgcacaattttcaaagaaagctaacgaaatggaaaaatggctgaaaaacaaagatatagaaaaagtgaatgtcttttctatgacaatgactgtaaaacagatattaataaatattgtattctcgtctgtcatgataggtactgtgacaaagctcagcaggatgggaatttttgatttcatgcggtatgctgggtttttgccactgtctgattattctaatataaaagaatacattagagataaatttgaccctgatataactaacgtggcagatatatattttgttaatggaatcaaaaaactattgttcagaatggaagatctcaatttaagcacaaatgccaagcctgttgtcgtagaccacgaaaacgatattataggaggtataacaaacttgaatataaaatgtccaataacaggatcgactttactaacactagaggatttgtacaataatgtttatttggctatttatatgatgcctaaatcattgcacaatcatgttcacaatctaacaagtttgttaaatgtccctgctgagtgggagctaaagttcagaaaagaattaggtttcaacatatttgaagacatataccctaagaaagcaatgtttgacgacaaagacctattctctataaatggagctctgaacgtgaaagcattatccgattactatctagggaatatagacaatgttggtttgatgagatcagaaatagaaaataaagaagatttcctgagcccgtgttacaagatatctactttaaaatcttcaaaaaagtgctcacaatcaaacattataagcactgatgagataatagagtgtctccagaacgcaaagattcaagatatagaaaactggaaagggaataatttggctattataaaagggcttataagaacttacaatgaggaaagaaatcgattagtggaattctttgaagataattgtgtcaattcgttgtatcttgtagaaaagcttaaagagataattaatagtggattgataactgcagggaaatctgtaacatccaaattcataagaaataaccatccattaacagtagaaacatatctcaaaacaaaactatattatagaaataatgtaacagttttaaagtctaaaaaagtgtcagaggagctttatgaccttgtaaaacagtttcataacatgatggaaatagatctagattctgttatgaaccttggtaaaggcacagaagggaagaaacacacattcttgcagatgcttgaatttgtcatgtccaaggctaaaaatgtcacagggtctgtagattttttagtttctgtttttgaaaaaatgcagagaactaaaacagacagagaaatatacttgatgagcatgaaagtgaaaatgatgctttactttatagagcacacattcaaacatgtagcacagagtgatccatcagaagctatctctataagtggagacaacaaaataagggcactttctacattatctttggacacaatcacatcttacaatgatattttgaacaaaaattcaaagaagtcaagattggctttcttatctgccgatcagtcgaaatggtcagcatcagaccttacctataaatatgttttagctatcatattaaatccaattttaactactggtgaagccagcttgatgatagaatgcattttaatgtatgttaaattgaaaaaggtttgtataccaacggatatttttttgaacctaagaaaagctcaaggaacttttgggcaaaatgaaactgccataggacttttgactaaaggtttgacgacaaacacatacccggttagcatgaactggttgcaaggcaatttaaattatctgtcgtctgtttatcattcttgtgcaatgaaagcttatcacaagactctagaatgttacaaagactgcgatttccaaactagatggattgtgcactctgatgacaatgcgacatcattgatagccagtggagaggtcgataaaatgctaacagatttttcaagctcatctctgccagaaatgttgtttagaagcattgaagctcatttcaaaagcttttgcataactttgaaccctaaaaagagttatgcttcttcatcagaagtagagtttatatctgaaagaattgtaaatggagcaattattcctctctattgcagacatttagcaaactgttgcacagaatcttcacatataagttattttgatgatttgatgtcactcagtatacatgttacaatgcttttgaggaaaggctgtcccaatgaagtaataccttttgcttatggggctgtgcaagtacaagcattaagcatctattcaatgcttcctggtgaagtgaatgatagcattaggatttttaaaaaacttggagtaagtttaaaatcaaacgagattcccacaaacatggggggctggttaacttctcctatagagccattgtctatattaggtccatcatcaaatgatcaaattatctattacaatgtgataagagattttttgaacaaaaaaagtttagaagaggtcaaagatagtgtctcttcttctagttatctacagatgagattcagagagttaaaagaaaagtatgaaagaggaactctggaagaaaaagacaaaaagatgatatttcttactaatttgtttgagaaagcatcagtgtccgaagattcagacgttctaacaatcgggatgaaatttcaaaccatgttaactcagatcataaaattgcctaatttcataaatgaaaatgctttaaataagatgtcaagttataaggatttctcaaaactttaccctaatctaaaaaagaatgaagatctatataagagtactaagaacttgaagatagacgaggatgctgttttagaggaagatgagttatatgagaagattgcgtctagcttagaaatggagtctgtccatgacataatgataaaaaatcctgaaacaattctgatagcaccattgaatgatagggattttttacttagtcagctgtttatgtacacaagcccttccaaaaggaatcaattatcgaaccaatctacagagaaacttgctttagatagggtattaaggtcaaaagctagaacatttgtggacatttcttccactgtgaagatgacttatgaagaaaacatggaaaagaaaatcttagaaatgctaaaatttgatttagattcatattgttcatttaaaacatgtgtaaatctagtaatcaaagatgttaatttcagcatgctgattccaatattggattctgcatacccttgtgaatctagaaaaagagataattacaatttcaggtggtttcagactgagaaatggatacctgttgttgaaggctctccgggactagtagtgatgcatgctgtttatggatcaaattatatagaaaatttaggtttaaaaaacatccctctaacagatgatagcattaatgttttaacaagcacatttggaacaggtctaatcatagaagatgtgaaatctctagttaaaggtaaagacagctttgaaacagaggcttttagtaattctaatgaatgtcaaagattggtgaaagcatgcaactatatgatagcagcacaaaacaggcttttagcaattaacacatgcttcactaggaaaagcttccctttctattccaagttcaatctagggagaggatttatttcaaacacactagctctcctatccaccatctacagcaaagaagaatcctatcattttgtttctacagctagttataaactagacaaaaccatcagaactgtgataagcgctcagcaagatatgaacttggaaaaaatactggacactgctgtatacatatcagataaattgcagtcacttttcccaacaattactagagaagatatagctttgatattacaaaatgtgtgccttgacagcaagcctatatggcagagtctagaagacaaaatgaaaaggattaacaattcaacagctagtggcttcacagtatcaaatgtgatcctatcacataacagtgaattgaacacaatccagaaacaaattgtctggatgtggaacatgggtttgtgttctcatagaacattagattttgttatcagatatattcgaagaagtgatgtaagatatgtgaaaactgaagaacaagacgaatcacgaaattatgtctctggaacaatgtacaaaattgggatcatgacaagaagctgttatgttcaattgatagcttctgatcatgatgtagcagtttctttgagaacaccattcgagatattgaatgaaagagagtatctttttgatacatacagagagagtatagagaaattgctgcagaaatttatgtttgataaagtgaacataataaagtcaaaacaaccacagattgtcttcttagaaccaggagatgcctgcattagaatgactacagataacaaaatgattgtcaaggttaatgccacatcaagacaaataagactagagaatgtaaaattagttgtgaagataaaatatgaaaatgtgaactctgatgtatgggatattatagaaggccaaaagtctctagtcttgaggcttcctgaagtaggggaatgtttctctgatatgtacaaaactgcagactctgaaaccgaaacaatcaaaaccataaaaaacaggctcatgacctctttaactttcatagaagcctttggaaacttatcacagcagatcaaagagattgtatatgatgatatcagagaaacaatggatgaattcttaatgaacatccgggatacctgcttagaaggtttggaaaactgcaaaagtgtagaagaatatgataattatctcgatgaagatggttttaatgacacagtggaactattcgaaaacttgctaagaacacatgataactttgaagatgagtatagtcctctgttttcagagattgttgataaagcaaaacagtacactagagatttagaaggtttcaaagaaatactgctcatgcttaaatattccctgataaatgatgcatcgggatttaaaagctatagagccactggaatgcatgctgttgaactaatggcaaaaaaacacatagaaataggagaattcaacttgttaggaatgatccaactgattaaagcttgtgaaacatgccacaacaatgactctatattaaacttagcaagtttgaggaatgttcttagcaggacatatgccacattcgggaggagaataggattgaaccatgatctggacttgcaaaacaatttaatggaaaaaagttgtgatttcaagacgctggttttaccagacataaaattatcagaactatctagggagatactgaaagaaaatgggtttgttatatctggagagaatctaaaaatggataggtctgatgaagaatttgagggtcttgctagttttaatgtgttgaggctagatgaggaagaaatgtatgaaggtttgatcaaagaaatgaaaattaaaaggaaaaagaaagggtttttattcccggcaaatacacttctactaagtgagttgataaaattcttgattggagggataaagggaaccagttttgatatagagacattgttgcggaacagttttagaccagacatattttcgaccgacagattgggtaggttgagttctagtgtacctgcactcagagtttatgcaactgtttatatggaatataagaatgcaaattgtcccttaaatgagatagctgacagcttggaaggttatctaaaactgacaaaaagcaagcctaaggagcatttcttgcatggaagagtcaagaaagccttgatacaattaagagatgaacaatcacgaactaaaaaattagaggtttataaagatatcgcaaatttcctttccagacatccactatgtttgtcagagaaaaccttgtatggaagatacacctactctgatattaatgattatatcatgcaaacaagagagattattttgagtaaaataagtgagttggatgaggttgttgaaacagatgaggacaatttcttgcttagttatctaagaggagaagaagatgcctttgatgaagatgaaattgatgaagaagaagatacagattaa

SEQ ID NO: 221 - DNA, 8669 bp, Watermelon bud necrosis virus
  source 1..8669: mol_type = other DNA
atgaacattcaaactataaacagttttctagatgcttcaggcgaaaccactgcatatctgcagagaataaaagatgaaatcatgttaatgtcaaatgttatagaacaaggttattctgaaggtaaaggtgtaattgaatctggattgagttctataatgtctatgaattatattctagacaagattgaagacatgaaatcaaaataccatcagagctcctcttctattgatcaaagagaaatggaaacagaaatctatttatttctcgataaatataaagaactagagttgatgaggcatgatctctttggtgttcttgctggaagaagattacattttgttccaaaacacagatctgatgtttttatgaaagattgtcttatgtcttatatagagttctgcagtgcttcagtgtccatttcgaacaaaatagacaaccttgatagtctaaaagaaaaattgatcttccagcacctaacaccagacaattacacaatatacaaagaaaccaaaggtgagaaagcatgtttgatgatatatgattggaaagtgtctgtagatgctgtgtctgaaggcaagacgtcagaaaactattacacaagtgtttggaaaacttttaaagatatcactatagacgaagaaccttttttagagagacacccaatattcataaccattgttgtgttgaatcctagcggtaatatgccaattgtggcaacaacttgccgggtcgtccaggagttcaggaactcaccatataaaaccttcaatgaccgcaaacgagctgctgaagcagcaaagctaatatcagttaattctctaggtcagcttataggtctgggtgctgactgttttaggcggttttactcagaaacacaatcgtttaagaactctctcttatctaaggttggcaagtatatgaacaggtcatcggaggttttctttagccactggtcatgtgaatacaggaaaactaatttatcaaacaatcaaattagtcaagatattattgatttgatcaattccttgcctaacgatgtggtggggaaggagatccttgttcattttctttttgggaattatttatacttcaaagagactatgagtgaacttcatctcaaagatagatttgaggggtacagatcacactgcaaaatgatgagaattcgtcctttggaaaatgaagaaaaacttaaagactatcttgatagaaatgagcatatttttgagagtttgtatgaaacacatctcaaaaagataaaatcagatgtgctactcagaaaatctaaagaaatagagatagaaagcatagagcgagctttcaacattaatgcagaggagtaccaaaaagagtatcctggatgtttcacaaatgatcttcaagaaactaaaacaaacttttcaatctgctggtcaccaatgacagaagaactaaagatgaatgatcttaattataataatgcaataatacaatctttcagagatgctttgagtgaacagccaaagcttattcaccataaatcatatggtggggctaaagtagacacttatttttccacaactctttttaatttagttagagcttgtctagtagatctaagtacagatacaacgggacattcaaaggctaccttagaagacgtagtggatattaaagatggcagcatccaggtaaaaagaactgaagcctcacagagatggagagaaatagggaatgtcaagactagaaatgggaatgagttcacgttatcaccgcaagcagacactgaagcaagaaagaattttttcagaggtttaaacttgatgtatgttgacatggggaagaaaaagaagatagatataaagaatgaattaaaaagcaagatccaggagtcaatggctcagcaaaagaatgaaaacatggatggcccgagcggggagtatgatgtgtcaaaagccaatatacctcaccaaacgagcctcaaagggatcacacataacaaaaagctaatcagacatgataacccagatgttaaatatcattgtgagtcaatgattgaatctatgtacgtccttcatggtatggacgaaagaaaagataaaaatagtaaaataaattctgtctacaatgaatattgctcaaatccttcttcactatttactaaaggcaatttgatagaaactgaaatgacaattgcaaagaatatccatgaagtagctaaggaactttcaatttacacatatagtgaagacatgatgcagatggcaaaaggtttgatggtggctgacaggtttatgaagaaaacagacttcaagatcttaacttgtgccaatacaagcatgatatgcctagcattcaaaggtgacggcataaacacagggaagtcaggtgtgccttacatcaccatacacaaggtagacaagagcatccaaccacactttgtttctttatacacaaaagaactaatagtgtcttttaaatcagagaattattttattaatatcatgaggccacaaaggctaaatcaggtgcgacttctcagcctgttcaaagctcctagtaaagtccctatcctcttttcacaatattccttattgagtacagagataaaaaaatggttgaatcagcaatccatagatgttttcacttgccctgaaaataagatccagtatctgcaaaagatattattctcctctgtgatcattggcactgtgaccaaactcagcagaatgggaatttttgatttcatgaggtatgcacggtttctaccactgtctgattattccaatataaaggaatatatagctgagaagtttgacccagatataacaaatgttattgattgtttttttgtttctggaattaagaatcttcttctgaaaatggaaggtataaatttaagtaatagtataaaacctctgactatagatcaagaaaatgatatgtctggaggtatatcagatttagacatcatatgccctatcacaggatctacactaaagactatagagtgtctgtataacaatgtctatcttgcaatttacatgatgccgaaatctctccacactcatgtacacaatctcacaacacttctgagtgtcccggctgaatgggaaattaagtttagagaaaaaatgggctttatgataggagatgaaattaaaccaaagaaagaaatgttcaatgattctggtccattctcaattaatggagtgctcaatgtgaaaactttgtttgattattacaagaaaaatattacaaatgttggtgcttgtagatcaaatatagaagaaaaagaggattttttgtctgctccatataaaataaaaactttaacatcatctaaaaaatgctcaaaggcagatatcataaaaagtacagagatagttgctgctttaaaatcatcatatggaaaacagccagatgatataaagggttcagacctttatatactgaagggagttctgaagtgttttgatgaagatagagattcattaaccaacttcttggaggtagaaggcttagaagagtcaaaatatttacatttttttaccaacatgatgtcaggtgataataaaatattgatgaaaactaaccaagacaaattttattataaaagtcatcctttgacagtggagacatttatgaaagttaggtatggttatttcaagacaaccactgttttaaaatcaaaaaaagtaagtgaggaattgtatgatttaatcaaagagttcaacaagataacagaggttgacctggaagctttggaaaagctaggtcgtggactaaaaggcaatcgagtcacatttatacaattattggaatttattttgatgaaatccagaaccaatgctgggaacacagatttcttggtatcaatatttgaaaagatgcagagaacaaagatggatagagagatttatcttatgagcatgaaaacaaaaatgatgttgtattttatagagcatacatacaagcatgtggctcaatctgatccttctgaagccatctcgatctctggagactacaaaattaaaaatttggcatctttatcatatgatactataactaattacaacacagctcttcagaaaaatcttgaatgcaaaatggcttttttatctgcagatcaatcaaaatggtctgcatcagatctaacctataaatacatcttggctgttattatgaatcctcttttaaccacaggagaaataaacctgatgtgtgagtgcataatgatgtatgtaaagttgaagagagtttgtattcctaccgacatctttctaaacctaaaaagagggcaaactgaatatggatcttatggaactgcactgtctgttttaacagataacttagaaacaaatacatttcctgtatccatgaactggctccaagggaatttgaattatctttcgtcagtgtaccactcttgtgcaatgatgggctatgaaaaagctatgaaaaagatgggaaactatgatttcactataagatggatggtgcattcagatgataatgctacttctatggtggttagaggggatataaaagaacttcttgccgagtttaattgcaccagtctgtcagaactgcttttccggagtatacaatcacattttaaaagttattgcataacattaaatccaaaaaagagctatgcctcagaatcagaggtagaatttatatctgaacgaataattaatggtgctgtcatacccttgtattgtagacacttagctaattgtagcacggaaagttcccataatagctattttggtgatctgatgtcactttctatacatataacaatgctcttaagaaaaggatgtcctaatgagctgataccatttgcttatgctgcaatacaaatccaatttctcagcatttactcaatgcttcctggggaagaaaatgatatatcaactattgtcaaagaaattgattttcccttatcaaaaagagaaatcccgatatgtgctggtggttggatgtatgcacctatagaattattgtctatcttaggtccttcatcaaacgatcaattgatttactacaaaatcatcctagatttttttaacctaaaagattttagtagtcttaagaaaagcgtcaactctttaggctacattgatttaagaatcaatgaattgttcaaaagaataaaatatcaaaaaataacaaatgcggataaaaaaatgatatgcatggttaacttatttaaaacaagtttgatgtctgaagactgtgacagtttaaatgtaggaatgaagttccaatccatgatcacacaaattataaaactacctagttttgttagtgaaggctcactgttgaagaactcaagtttccaagacttctgtaagctattccccaatttgaagaaaaacactgacatactcaacgcattaaaacctgttaacttggatgaaagaagccttgaagagttaaatgagagcaaatttttatcacaaatccagctagaagagttgagtaggcacatggcatctcatccagaatcgtttttgatagcaccaatgaatgacaaagattacattttgaccaatctctatacgtatagcagtgtaagcaaaaggaatcaaatgttaaatcaatcaactgagaaattggcattggatagaattttaaggtctaaagctaaaaccttcttagatcccaattcaaaagagatggtttcatataaagaaaatatgtctatgaaaatgagagagataatgagctatgctgggaatgacttcaaaattattaatactatatccagccttatggtgagagacatgaattttgaaatggtcgtctctttaatggagaacactgttgctaatgcttctattcctaaagcgaattataattttagatggttcataactgaaaaagtaccaagtgtcattgagggatcccccggtttaattgttatgtcagctgtttatggcatggattatttgatagagctaggactcaaaaaactccctttgacagaaacctctatctctatactgcatgacatctttggtaacagaaaaacatttgatgatgttaaagagtgtatacagaatgttaaaaagcaatacaagacagaagaatttcaaaatgcagatgttctaaagagatatgtattaagtataaattacatgatccagtcccaaaacaagcttctgtctatcaacacatgtttctccaggaagaatttccctttctattcaaaatataatctaggtaagacgttcataaccaatactttagctatatggagcactatatacagccgattgacaaatataaacttttacaccaatctgaattttgtaattgacaggagttctaggttgattatctcattgcaaagagacatgaatctagaaaaactaattgattgctgtgcctatgtttctgacagattgcaaagcttatttcccgatatgaccgtagagtctatccggcaagttttgtgcaggctaaattttaatggggtagatcttatgaagaaaatgaaatctgaaatagctgaggtaaaaagagccataaacaacataaagacatccactcatgtaactctctcattcaggccacaaatgatagcaatgagcaaacatgcagcatggttatacaattttggatatattaatgagaaagagttcaaatttgtcatagatcagatcagacaaagcgaagtccattatattaaaacagatgagcaagatgtcagaggttactatgtttcaggtcatacatacaaaatagggatcaaaacccagcataactatggacagcttgctatgtcaaaccaagatgtgtcaatccatctccactcaccgtatgaatacaagagagaagatgatgggaaaatatgggatgttcatgttagatctgtatataaattgcttcaaaagctcttaatggacaagcaaagtgtaattaaagcatttttaaatattagaacagaactaatgcccaatcaattttgtattcatgagagttcaaataaaactctattgatattgatcaatgatacaacccgaccaatctcattagagagaatcaaattcaaaggtgatataaaatacattccctcctctgactttgcctgggacatgatgagcaatcagtctaaatacagattgcgacaagcagaaacaggagaatgttacacagaattatacaaactaatagacaacaatgataatttgatgaacactattttaacaaatttaaagaaaagcttagaatatgggaatgaaatggagaaccttatagagcaatcaatccaagggatagatgatgcagatactattgaatatatccaagagtctgttgaccaaatccacaaattagccatagaaggtttagaaacatgtcagacatcagatgaatttgaaaactacctaaaaagagttgattttcaatctacagttgatttccataaagatcttttagagcagattgttgaggaaaaatatggttcagcagaaagactagatgttgctgtagagaagctaaccaaatggacaaacagtttatcaacatttaaagatgtgtgcacaatgttaaagttctccatggtcaatgattctaagggaattaaaacatataaagctaatggagctgatttccactcattatcagcaagtgaagtcatgacttcacaaggatttgatttgttcgaattactgaagttaataaaggcctgtgaagcttgccacaccagcaattcagtattgaacttaattgcttttaaaaatatcaaaaacaaaaccttcatcccagggtttaagagacacttgcccaatacagttcattttgactatgaaatgaaactaaataatgaagtgatgaacaaattctatgagtataaaacaatctcactacaagatataaaagtttctgatagagtaaagagggtccttgaaacaaatgggttcagtatcacaggccacaatttgaagttagaagaaacaaacttagaattgaaccccgtggagattatagatgactcttccacttatgatcaggttgccaagcaaatgaggttaacaaagaaaaagagctcatatcttatacctgctaacactctattgttaggagaactaatgaagttcttgatgctgtgcatcaaaggagaagaacatgatataatgaaacttttgagaagtcattttgcaatgcagcctgtaagagaaaatagattgctttgtatccaagatgctgttatgacatgcaggataagtggttatatccaaagacactttctcaatgacaagaaagaaatcgtactgttaggtgtagctgacagcttagagaacttcatttccttagcaactccaaactatgcaacacaggagccatttaaagcagaggctttgataaaaaaagccctggcagaagtgtatgattccggtaaatataagatactaaaaaatataagaaattatatagttgatgatgtagaatttcttacagaaaagtgtttatattcaaacataactaatgaggagataagcaacatgatatttaatgcagttagcaaaattgatctggaattatccaatttaaagccaaagaagagaaagaaaagactagacttacatgacgttttcaatggattcttgggatcagatgctactacttcggaacaacaataaaaaggaggtaatctatgggcgggaggaaagga

SEQ ID NO: 222 - DNA, 5535 bp, Turnip yellow mosaic virus
  source 1..5535: mol_type = other DNA
atggccttccaattagcattggacgcccttgcacccacgactcacagagatccctctctgcacccgattctcgaatccacagtggattcaattcgctcctcgatacagacctacccatggtccattccgaaggaacttctacccctactcaactcctacggcatcccaacatctggtttgggaacctcccaccacccccacgccgcccacaagacaatcgagacttttctcctttgcacccactggtctttccaggccaccactcccagctccgtcatgttcatgaaacccagcaagttcaacaaacttgcccaggtaaactcaaactttcgggagctgaagaactaccgcctgcaccccaacgacagcactcgttaccccttcacatcaccagaccttcccgttttccccaccattttcatgcacgacgccctgatgtattaccatccgtcccagatcatggacctgttcttncggaaaccaaacctcgaacgtctgtacgccagcctcgtagtgccacccgaggcccatctttccgaccaatccttctacccaaagttgtacacgtacacgacgacccgccacactcttcactacgtcccagagggtcacgaagccggcagctacaaccaaccgtccgacgcccactcttggctccgaatcaattccattcgcctcggcaaccaccacctctcagtgacgatcctggaatcctggggccccgtccactcgctcctcattcaacgagggacccccccccccgacccatcactccaggcccctccaacactcatgncctcagacctctttcggtcttaccaagancctcgcctcgacgtggtctccttccgaatccccgacgccatcgaacttccacaggccacattcctccaacaaccacttcgagaccgactggtcccccgagccgtctacaacgccctgttcacctataccagagcagtccgcacactccgaacttcagacccagcagcattcgtaaggatgcactcctccaaaccggaccacgattgggtcacctcgaacgcctgggacaacctgcaaaccttcgcacttctgaacgttcccctccgaccaaacgtcgtctaccacgttcttcagagcccaatcgcctccctaagcctttacctgaggcaacattggcgccgtcttaccgccaccgccgtccctatcctctccttcctaaccctcctgcagcgcttccttccattgcctatacctctagcagaggtaaaatccatcacagccttccgaagggagctttaccgaaagaaggagccccaccaccccctcgacgtcttccatctccagcaccgcgtccgcaactaccactccgcgatctcggccgtacgcccggcttccccaccccaccaaaaactcccacacgcactccagaaagccgcattactgcttctccgaccgatatcgcccctcttgacagcgaccccgttctttcggtccgaacagaagtccatgctcccgaacgccgaactttcatggaccctgaagcgcttcgctctgccctggcaagcctccctagtcctcctcgctctgtcggaatcatccatactgctccacaaactgttctccccgccaaccctccaagcccaacacgacacctaccaccgacatctccaccctggatcctacagtctccagtgggagaggacgccattgtcgattccgaggacgacagcatttcttcctttcactcccacgacttcgacagcccctccggaccgctccgaagccagtctccctcccgctttcgcctccaccttcgttccccgtccacctccagcggcatcgagccctggagcccagcctcctacgactacggcagcgcccccgacaccgattgaacccacccaacgcacccatcaaaattctgacctcgcgctcgaaagttcaacctcaaccgaacctcccccaccccccatccgatcccccgacangacgccctccgcccccgtccttttcccagaaatcaactcacctcgtcgttttcccccccaacttcccgccacgcccgatctcgaacccgcccacactccaccccctctttccatcccgcaccaagatccgactgactcagcggaccccctcatgggctcccaccttttgcaccattcactgcctgcaccccccacccacccccttccatcttcacagctgttacccgcacctttaacgaacgaccccactgcgatcggcccggtgctcccctttgaagaactccacccacgcaggtaccctgaaaacaccgccactttcctcacgaggctccgttcactcccatcaaaccatcttccacaacccaccttgaattgtcttctctccgctgtctccgaccaaaccaaggtttccgaggagcacctctgggagtccctacagacaattctcccagacagccaactcagcaatgaagagaccaacactctcgggctttcaactgaacacctcactgcgttggcccacctttacaacttccaggcaaccgtttactccgatcgcggccccatcctcttcggcccctccgacaccatcaagaggatagacatcacccacaccaccggaccgccatcccacttttcacccggcaaaagactcctaggcagccaaccctccgctaagggccatccctccgacccactcatcagagccatgaagtctttcaaagtatccggcaactaccttcccttctctgaggcccacaaccatcccacctccatctcacacgccaagaacttgatttcaaacatgaagaatggtttcgacggcgtcctctccctcctcgacgtctccacgggccaacgaaccggacccncccccaaagaacggatcatccagatagaccactaccttgacaccaaccccggcaaaaccactcctgtggtgcatttcgctggcttcgctggctgtgggaagacatatccgatccaacagctcctcaaaaccaaactgttcaaagacttccgggtctcttgccctaccacagaactcagaaccgaatggaagacagcgatggaactccacggctcccagtcatggcgctttaacacttgggagtcttccattctcaagtcatccagaatcctggtcattgatgagatctacaaaatgccaagagggtacctcgacctttccatcctcgccgaccccgccctcgagctcgtcataattctcggcgatcctctncagggcgagtaccactcccaatcgaaagactcatccaaccaccgccttccctctgaaactctcaggctgctaccatacatcgacatgtactgctggtggagttaccgcattcctcaatgcatcgcccgactcttccaaattcacagcttcaatgcctggcaaggagttatcgggtccgtttccactccccatgatcaatcccccgtcctcaccaacagtcatgcctcatctcttaccttcaacagcctgggatatcgctcctgcacgatcagctctagccaaggcctcacattctgcgaccccgccataatcgtcctggacaactacaccaagtggctctcctcggctaacggcctcgtcgccctcactcgatccagatcaggcgtccaattcatgngcccctcttcctacgtcgggggaaccaacggctcttccgccatgttttccgacgccttcaacaacagcctcatcatcatggatcgctacttcccatccctgttcccgcaactcaagctcatcacctcccccctcacaactcgcggccccaaactcaacggggccacccccagcgcatcccccacccaccgttcgccaaacttccaccttcccccacacattccgctctcctatgatcgtgattttgttacggtgaacccaactctccccgaccaaggacccgaaacaagactcgacacccactttctcccaccgtctcggctccctctccatttcgatctcccaccggctatcaccccacccccggtttccacaagcgtcgacccgccacaagcgaaagctagccccgtctacccaggcgagttcttcgattctctggcggcgttcttcttaccagcacacgacccatcaacaagggaaatactccacaaagatcaatctagcaaccagttcccctggttcgaccgacccttcagcctgtcctgccagccctcaagtctgatttccgccaagcatgcacccaaccatgatccgacccttctaccggcctccatcaacaaacgcttgcgattcagacccagtgactcaccgcaccaaatcaccgcggacgacgtggtcctaggcctgcaactctttcactctctttgtcgcgcctactcacgtcaacccaacagcaccgttccattcaaccctgaacttttcgcagaatgcatctctctgaatgagtacgcacagctcagttccaaaacccaatccaccatagtggccaacgcttcacgctccgacccagactggcgacacaccaccgtcaagatcttcgcgaaagcccaacacaaagtcaacgacggctccatcttcggctcgtggaaagcctgccagaccctcgcactcatgcacgactacgtgattctggttcttggacccgtcaagaaataccagagaatcttcgacaacgctgaccggccacctaacatctactcacactgcggcaagacacccaaccaacttcgagattggtgccaggaacatctcactcattccacccccaaaatcgcaaacgactacaccgctttcgaccagtcccagcatggagaatccgtggtccttgaagccctcaaaatgaagagactgaacattccnagccatctgattcagctccacgtccacctcaagaccaacgtctccacccagttcggccccctcacatgcatgcgcctaaccggggaacccggaacttacgacgacaacactgactataacctcgcagtcatctactcccagtatgacgtcggttcctgccccatcatggtttctggcgacgactcactcatagaccacccccttcccactcgccacgactggccatccgttctcaaacgcctccacctccgcttcaaacttgaactcacctctcaccccctcttctgtggctactacgtcggtccagccggctgcatccgcaaccccctggcccttttctgcaagctcatgatcgccgtggacgacgacgccctcgacgaccgacgactcagctacctcaccgagttcaccaccggacacctccttggcgaatcactgtggcacctcctccctgaaacccatgttcagtatcagtcagcctgctttgacttcttctgcaggcggtgcccaagacacgagaaaatgctcctcgacgactccacacccgcactcagcctcctcgaacgaatcacttcttcgccgaggtggctcaccaaaaatgccatgtacctcctccctgccaagctacgactggccatcacctctctatctcaaacgcagtccttcccagaatccatcgaggtttcccacgctgagtctgaattgcttcactacgtccaatag

SEQ ID NO: 223 - protein, 415 aa, Citrus tristeza virus
VVRSQAIPPRKASLQENLLSYESRNYNFIKTERFVGPSEFGRAMAAAVIERCFKMEEMAKIRCDIISLTEANILKWLDKRTPCQIKAVHGELKLPFSVEEQISNFKLMVKRDAKVKLDDSSLSKHPAAQNIMFHKKFINAIFSPCFDEFKNRVLSSLNDNIVFFTEMTNAGLAEIIRRIIGDDDNLFVGEVDFSKFDKSQDLFIKEYERTLYSEFGFDTELLDVWMEGEYRARATTLDGQLSFSVDGQRRSGGSNTWIGNSLVTLGILSLYYDVSKFDLLLVSGDDSLIYSSEKISNFSSEICLETGFETKFMSPSVPYFCSKFVVQTGNKTCFVPDPYKLLVKLGAPQNKLTDVELFELFTSFKDMTQDFGDQVVLEKLKLLVEAKYGFASGTTMPALCAIHCVRSNFLSFERL

SEQ ID NO: 224 - protein, 446 aa, Beet yellows virus
TQVFESGADNVVIRDSAPVNKSTDHDPQRVSSIRSQAIPKRKPSLQENLYSYESRNYNFTVCERFSGPQEFGQAMAMVMLERSFDLEKVAKVRSDVIAITEKGVRTWMSKREPSQLRALSSDLQKPLNLEEEITTFKLMVKRDAKVKLDSSCLVKHPPAQNIMFHRKAVNAIFSPCFDEFKNRVITCTNSNIVFFTEMTNSTLASIAKEMLGSEHVYNVGEIDFSKFDKSQDAFIKSFERTLYSAFGFDEDLLDVWMQGEYTSNATTLDGQLSFSVDNQRKSGASNTWIGNSIETLGILSMFYYTNRFKALFVSGDDSLIFSESPIRNSADAMCTELGFETKFLTPSVPYFCSKFFVMTGHDVFFVPDPYKLLVKLGASKDEVDDEFLFEVFTSFRDLTKDLVDERVIELLTHLVHSKYGYESGDTYAALCAIHCIRSNFSSFKKL

SEQ ID NO: 225 - protein, 295 aa, Potato virus X
GTVRQSPDFDENKIMVFLKSQWVTKVEKLGLPKIKPGQTIAAFYQQTVMLFGTMARYMRWFRQAFQPKEVFINCETTPEDMSVWALNNWNFSRPSLANDYTAFDQSQDGAMLQFEVLKAKHHCIPEEIIQAYIDIKTNAQIFLGTLSIMRLTGEGPTFDANTECNIAYTHTKFDIPAGTAQVYAGDDSALDCVPEVKHSFHRLEDKLLLKSKPVITQQKKGSWPEFCGWLITPKGVMKDPIKLHVSLKLAEAKGELKKCQDSYEIDLSYAYDHKDSLHDLFDEKQCQAHTLTCRT

SEQ ID NO: 226 - protein, 70 aa, Potato virus A
GQLGVWNGSLKAELRPKEKVDLNKTRTFTAAPIETLLGGKVCVDDFNNMFYSLHLKAPWSVGMTKFYGTW

SEQ ID NO: 227 - protein, 236 aa, Potato virus Y
GLLGIWNGSLKAELRCKEKILANKTRTFTAAPLDTLLGGKVCVDDFNNQFYSKNIECCWTVGMTKFYGGWDKLLRRLPENWVYCDADGSQFDSSLTPYLINAVLTIRSTYMEDWDVGLQMLRNLYTEIVYTPISTPDGTIVKKFRGNNSGQPSTVVDNSLMVVLAMHYALIKECVEFEEIDSTCVFFVNGDDLLIAVNPEKESILDRMSQHFSDLGLNYDFSSRTRRKEELWFMSH

SEQ ID NO: 228 - protein, 236 aa, Pepper mottle virus
GKLGVWEWALKAELRSKEKIEANKTRTFTAAPIDTLLGGKVCVDDLNNQFYSKNIECCWTVGMTKFYGGWDKLLTALPAGWIYCDADGSQFDSSLTPYLINAVLTIRYAFMEDWDIGYKMLQNLYTEIIYTPISTPDGTIVKKFRGNNSGQPSTVVDNSLMVVLAMHYAFVREGIAFEEIDSICKFFVNGDDLLIAVNPERESLLDTLSNHFSDLGLNYDFSSRTRNKSELWFMSH

SEQ ID NO: 229 - protein, 235 aa, Bean yellow mosaic virus
GRMGVWNGSLKAELRPQEKVLANKTRSFTAAPIDTLLAGKVCVDDFNNKFYSLHLKIPSTVGITKFYGGWDRLLNSLPDGWVYCDADGSQFDSSLTPYLLNAVLEMRLRLMEEWDLGEQMLKNLYTEIVYTPILTPDGTVVKKFKGNNSGQPSTVVDNTLMVIMAVYYAAEKLGIKGNLEDTLVFFANGDDLLIAIKPECESYLDKFEGLFSELGLKYDFSSRTKNKGDLWFMSH

SEQ ID NO: 230 - protein, 188 aa, Wheat stripe mosaic virus
RVYRFQLKDIEKPFKDAIVDLGKAGQGILAWSKEAHVMFMLAFRVLNDLLLKSLKPWVVYDNSMSEEQFLDKVNAAMTVTPDCAVNSVIDATACDSGQNGFTQLIERQIYARLGASELLLDWYFSFREKYILQAEHVRAPMENVKTSGEPGTLLGNSILMAAILNALVRGSGPFVLVMKGDDGFKRQA

SEQ ID NO: 231 - protein, 401 aa, Rice yellow mottle virus
KQSLTSLILQAGRFNRTVCPPGLAQAVQSLQERYPKVPPRRCLRDEWRFDDIFDEVERILCETGEVNSASSPGVPLAGLANSNGEVRGLARDLVCLAVVERLNALASVDPRQHNWTPRELVEKGLCDPVRLFVKNEPHPRRKLLERRFRLISSVSLVDQLVERMLFGPQNNTEISTWWQWPSKPGMGLLTPEQIRLVWDDVFQKHQAHPAAEADISGFDWSVQDWELWSDLAIRINRGNFQGNLRRAAISRYYCFMNSVFQLSDGTLIQQELPGLMKSGSYCTSSTNSRIRCLMAELIGSPWCIAMGDDSVEGWIEGAQSKYAALGHTCKEYYPCKTRGRELLEFNFCSHLIRRGHAELTSWPKALFRFLSSKHEDFEDLWVELHTCGVWSRIERYLRGIG

SEQ ID NO: 232 - protein, 235 aa, Maize dwarf mosaic virus
GKLGIWNGSLKAEIRPIEKTEANKTRTFTAAPLETLLAGKVCVDDFNNQFYAHHLNGPWTVGITKFYGGWNRLLEKLPDGWIYCDADGSQLDSSLTPYLINAVLNIRLQFMEPWNIGEQMLKNLYTEIVFTPIATPDGSVIKKFKGNNSGQPSTVVGNTLMVIIAFNYTLLSCGVDLEKADDVCRMYANGDDLLLAVNPTHVDILNEFGKHFAALGLNFDFESRTRDKSELWFMS

SEQ ID NO: 233 - protein, 167 aa, Zucchini yellow mosaic virus
DFFKYNKPVTVNQLDHDKFLEAVDGVIRMMCDFEFNECRFITDPEEIYNSLNMKAAIGAQYRGKKKEYFEGLDDFDRERLLFQSCERLFNGYKGLWNGSLKAELRPLEKVRANKTRTFTAAPIDTLLGAKVCVDDFNNEFYSKNLKCPWTVGMTKFYGGWDRLMRSL

SEQ ID NO: 234 - protein, 236 aa, Watermelon mosaic virus
GEKGIWNGSLKAELRPIEKVQANKTRTFTAAPIDTLLGAKVCVDDFNNQFYSFNLKCPWTVGMTKFYGGWDKLMRSLPDGWTYCHADGSQFDSSLTPLLLNAVLSIRCCFMEDWWVGKEMLENLYAEIVYTPILAPDGTIFKKFRGNNSGQPSTVVDNTLMVVIAMYYSCCKQGWSEEDIEERLVFFANGDDIILAVRDEDVWLYDTLSASFAELGLNYNFDERTKKREELWFMSH

SEQ ID NO: 235 - protein, 235 aa, Sugarcane mosaic virus
GNLGIWNGSLKAEIRPIEKTTLNKTRTFTAAPLETLLGGKVCVDDFNNQFYSHHLQGPWTVGITKFYGGWNRLLEKLPDGWIYCDADGSQFDSSLTPYLINAVVKIRLQFMEEWDLGERMLQNLYTEIVYTPIATPDGSVIKKFKGNNSGQPSTVVDNTLMVILAFNYAMLSSGIREDEIDNCCKMFANGDDLLLAVHPDFEYILDGFQNHFSNLGLNFDFTSRTKEKSDLWFMS

SEQ ID NO: 236 - protein, 1616 aa, Tobacco mosaic virus
MAYTQTATTSALLDTVRGNNSLVNDLAKRRLYDTAVEEFNARDRRPKVNFSKVISEEQTLIATRAYPEFQITFYNTQNAVHSLAGGLRSLELEYLMMQIPYGSLTYDIGGNFASHLFKGRAYVHCCMPNLDVRDIMRHEGQKDSIELYLSRLERGGKTVPNFQKEAFDRYAEIPEDAVCHNTFQTMRHQPMQQSGRVYAIALHSIYDIPADEFGAALLRKNVHTCYAAFHFSENLLLEDSYVNLDEINACFSRDGDKLTFSFASESTLNYCHSYSNILKYVCKTYFPASNREVYMKEFLVTRVNTWFCKFSRIDTFLLYKGVAHKSVDSEQFYTAMEDAWHYKKTLAMCNSERILLEDSSSVNYWFPKMRDMVIVPLFDISLETSKRTRKEVLVSKDFVFTVLNHIRTYQAKALTYANVLSFVESIRSRVIINGVTARSEWDVDKSLLQSLSMTFYLHTKLAVLKDDLLISKFSLGSKTVCQHVWDEISLAFGNAFPSVKERLLNRKLIRVAGDALEIRVPDLYVTFHDRLVTEYKASVDMPALDIRKKMEETEVMYNALSELSVLRESDKFDVDVFSQMCQSLEVDPMTAAKVIVAVMSNESGLTLTFERPTEANVALALQDQEKASEGALVVTSREVEEPSMKGSMARGELQLAGLAGDHPESSYSKNEEIESLEQFHMATADSLIRKQMSSIVYTGPIKVQQMKNFIDSLVASLSAAVSNLVKILKDTAAIDLETRQKFGVLDVASRKWLIKPTAKSHAWGVVETHARKYHVALLEYDEQGVVTCDDWRRVAVSSESVVYSDMAKLRTLRRLLRNGEPHVSSAKVVLVDGVPGCGKTKEILSRVNFDEDLILVPGKQAAEMIRRRANSSGIIVATKDNVKTVDSFMMNFGKSTRCQFKRLFIDEGLMLHTGCVNFLVAMSLCEIAYVYGDTQQIPYINRVSGFPYPAHFAKLEVDEVETRRTTLRCPADVTHYLNRRYEGFVMSTSSVKKSVSQEMVGGAAVINPISKPLHGKILTFTQSDKEALLSRGYSDVHTVHEVQGETYSDVSLVRLTPTPVSIIAGDSPHVLVALSRHTCSLKYYTVVMDPLVSIIRDLEKLSSYLLDMYKVDAGTQXQLQIDSVFKGSNLFVAAPKTGDISDMQFYYDKCLPGNSTMMNNFDAVTMRLTDISLNVKDCILDMSKSVAAPKDQIKPLIPMVRTAAEMPRQTGLLENLVAMIKRNFNAPELSGIIDIENTASLVVDKFFDSYLLKEKRKPNKNVSLFSRESLNRWLEKQEQVTIGQLADFDFVDLPAVDQYRHMIKAQPKQKLDTSIQTEYPALQTIVYHSKKINAIFGPLFSELTRQLLDSVDSSRFLFFTRKTPAQIEDFFGDLDSHVPMDVLELDISKYDKSQNEFHCAVEYEIWRRLGFEDFLGEVWKQGHRKTTLKDYTAGIKTCIWYQRKSGDVTTFIGNTVIIAACLASMLPMEKIIKGAFCGDDSLLYFPKGCEFPDVQHSANLMWNFEAKLFKKQYGYFCGRYVIHHDRGCIVYYDPLKLISKLGAKHIKDWEHLEEFRRSLCDVAVSLNNCAYYTQLDDAVWEVHKTAPPGSFVYKSLVKYLSDKVLFRSLFIDGSSC

SEQ ID NO: 237 - protein, 1616 aa, Tomato mosaic virus
MAYTQTATSSALLETVRGNNTLVNDLAKRRLYDTAVDEFNARDRRPKVNFSKVVSEEQTLIATKAYPEFQITFYNTQNAVHSLAGGLRSLELEYLMMQIPYGSLTYDIGGNFASHLFKGRAYVHCCMPNLDVRDIMRHEGQKDSIELYLSRLERGNKHVPNFQKEAFDRYAEMPNEVVCHDTFQTCRHSQECYTGRVYAIALHSIYDIPADEFGAALLRKNVHVCYAAFHFSENLLLEDSHVNLDEINACFQRDGDRLTFSFASESTLNYSHSYSNILKYVCKTYFPASNREVYMKEFLVTRVNTWFCKFSRIDTFLLYKGVAHKGVDSEQFYKAMEDAWHYKKTLAMCNSERILLEDSSSVNYWFPKMRDMVIVPLFDISLETSKRTRKEVLVSKDFVYTVLNHIRTYQAKALTYSNVLSFVESIRSRVIINGVTARSEWDVDKSLLQSLSMTFFLHTKLAVLKDDLLISKFALGPKTVSQHVWDEISLAFGNAFPSIKERLINRKLIKITENALEIRVPDLYVTFHDRLVSEYKMSVDMPVLDIRKKMEETEEMYNALSELSVLKNSDKFDVDVFSQMCQSLEVDPMTAAKVIVAVMSNESGLTLTFEQPTEANVALALQDSEKASDGALVVTSRDVEEPSIKGSMARGELQLAGLSGDVPESSYTRSEEIESLEQFHMATASSLIHKQMCSIVYTGPLKVQQMKNFIDSLVASLSAAVSNLVKILKDTAAIDLETRQKFGVLDVASKRWLVKPSAKNHAWGVVETHARKYHVALLEHDEFGIITCDNWRRVAVSSESVVYSDMAKLRTLRRLLKDGEPHVSSAKVVLVDGVPGCGKTKEILSRVNFEEDLILVPGRQAAEMIRRRANASGIIVATKDNVRTVDSFLMNYGKGARCQFKRLFIDEGLMLHTGCVNFLVEMSLCDIAYVYGDTQQIPYINRVTGFPYPAHFAKLEVDEVETRRTTLRCPADVTHFLNQRYEGHVMCTSSEKKSVSQEMVSGAASINPVSKPLKGKILTFTQSDKEALLSRGYADVHTVHEVQGETYADVSLVRLTPTPVSIIARDSPHVLVSLSRHTKSLKYYTVVMDPLVSIIRDLERVSSYLLDMYKVDAGTQXQLQVDSVFKNFNLFVAAPKTGDISDMQFYYDKCLPGNSTLLNNYDAVTMKLTDISLNVKDCILDMSKSVAAPKDVKPTLIPMVRTAAEMPRQTGLLENLVAMIKRNFNSPELSGVVDIENTASLVVDKFFDSYLLKEKRKPNKNFSLFSRESLNRWIAKQEQVTIGQLADFDFVDLPAVDQYRHMIKAQPKQKLDLSIQTEYPALQTIVYHSKKINAIFGPLFSELTRQLLDSIDSSRFLFFTRKTPAQIEDFFGDLDSHVPMDVLELDVSKYDKSQNEFHCAVEYEIWRRLGLEDFLAEVWKQGHRKTTLKDYTAGIKTCLWYQRKSGDVTTFIGNTVIIASCLASMLPMEKLIKGAFCGDDSLLYFPKGCEYPDIQQAANLMWNFEAKLFKKQYGYFCGRYVIHHDRGCIVYYDPLKLISKLGAKHIKDWDHLEEFRRSLCDVAESLNNCAYYTQLDDAVGEVHKTAPPGSFVYKSLVKYLSDKVLFRSLFLDGSSC

SEQ ID NO: 238 - protein, 1601 aa, Turnip vein-clearing virus
MAQFQQTIDMQTLQAAAGRNSLVNDLASRRVYDNAVEELNARSRRPKVHFSKAVSTEQTLIATNAYPEFEISFTHTQSAVHSLAGGLRSLELEYLMMQVPFGSLTYDIGGNFSAHLFKGRDYVHCCMPNLDVRDIARHEGHKEAIYSYVNRLKRQQRPVPEYQRAAFNNYAENPHFVHCDKPFQQCELTTAYGTDTYAVALHSIYDIPVEEFGSALLRKNVKTCFAAFHFHENMLLDCDTVTLDEIGATFQKSGDNLSFFFHNESTLNYTHSFSNIIKYVCKTFFPASQRFVYHKEFLVTRVNTWYCKFTRVDTFTLFRGVYHNNVDCEEFYKAMDDAWHYKKTLAMLNAERTIFKDNAALNFWFPKVRDMVIVPLFDASITTGRMSRREIMVNKDFVYTVLNHIKTYQAKALTYANVLSFVESIRSRVIINGVTARSEWDTDKAILGPLAMTFFLITKLGHVQDEIILKKFQKFDRTTNELIWTSLCDALMGVIPSVKETLVRGGFVKVAEQALEIKVPELYCTFADRLVLQYKKAEEFQSCDLSKPLEESEKYYNALSELSVLENLDSFDLEAFKTLCQQKNVDPDMAAKVVVAIMKSELTLPFKKPTEEEISESLKPGEGSCAEHKEVLSLQNDAPFPCVKNLVEGSVPAYGMCPKGGGFDKLDVDIADFHLKSVDAVKKGTMMSAVYTGSIKVQQMKNYIDYLSASLAATVSNLCKVLRDVHGVDPESQEKSGVWDVRRGRWLLKPNAKSHAWGVAEDANHKLVIVLLNWDDGKPVCDETWFRVAVSSDSLIYSDMGKLKTLTSCSPNGEPPEPNAKVILVDGVPGCGKTKEIIEKVNFSEDLILVPGKEASKMIIRRANQAGVIRADKDNVRTVDSFLMHPSRRVFKRLFIDEGLMLHTGCVNFLLLLSQCDVAYVYGDTKQIPFICRVANFPYPAHFAKLVADEKEVRRVTLRCPADVTYFLNKKYDGAVMCTSAVERSVKAEVVRGKGALNPITLPLEGKILTFTQADKFELLEKGYKDVNTVHEVQGETYEKTAIVRLTSTPLEIISSASPHVLVALTRHTTCCKYYTVVLDPMVNVISEMEKLSNFLLDMYRVEAGVQYQLQIDAVFRDSNLFVQTPKSGDWRDMQFYYDALLPGNSTILNEFDAVTMNLRDISLNVKDCRIDFSKSVQLPKEQPIFLKPKIRTAAEMPRTAGLLENLVAMIKRNMNAPDLTGTIDIEDTASLVVEKFWDSYVDKEFSGTNEMTMTRESFSRWLSKQESSTVGQLADFNFVDLPAVDEYKHMIKSQPKQKLDLSIQDEYPALQTIVYHSKKINAIFGPMFSELTRMLLERIDSSKFLFYTRKTPAQIEDFFSDLDSTQAMEILELDISKYDKSQNEFHCAVEYKIWEKLGIDEWLAEVWKQGHRKTTLKDYTAGVKTCLWYQRKSGDVTTFIGNTIIIAACLSSMIPMDKVIKAAFCGDDSLIYIPKGLDLPDIQAGANLMWNFEAKLFRKKYGYFCGRYVIHHDRGAIVYYDPLKLISKLGCKHIRDVVHLEELRESLCDVASNLNNCAYFSQLDEAVAEVHKTAVGGSFAFCSIIKYLSDKRLFRDLFFV

SEQ ID NO: 239 - protein, 1612 aa, Pepper mild mottle virus
MAYTQQATNAALASTLRGNNPLVNDLANRRLYESAVEQCNAHDRRPKVNFLRSISEEQTLIATKAYPEFQITFYNTQNAVHSLAGGLRSLELEYLMMQIPYGSTTYDIGGNFAAHMFKGRDYVHCCMPNMDLRDVMRHNAQKDSIELYLSKLAQKKKVIPPYQKPCFDKYTDDPQSVVCSKPFQHCEGVSHCTDKVYAVALHSLYDIPADEFGAALLRRNVHVCYAAFHFSENLLLEDSYVSLDDIGAFFSREGDMLNFSFVAESTLNYTHSYSNVLKYVCKTYFPASSREVYMKEFLVTRVNTWFCKFSRLDTFVLYRGVYHRGVDKEQFYSAMEDAWHYKKTLAMMNSERILLEDSSSVNYWFPKMKDMVIVPLFDVSLQNEGKRLARKEVMVSKDFVYTVLNHIRTYQSKALTYANVLSFVESIRSRVIINGVTARSEWDVDKALLQSLSMTFFLQTKLAMLKDDLVVQKFQVHSKSLTEYVWDEITAAFHNCFPTIKERLINKKLITVSEKALEIKVPDLYVTFHDRLVKEYKSSVEMPVLDVKKSLEEAEVMYNALSEISILKDSDKFDVDVFSRMCNTLGVDPLVAAKVMVAVVSNESGLTLTFERPTEANVALALQPTITSKEEGSLKIVSSDVGESSIKEVVRKSEISMLGLTGNTVSDEFQRSTEIESLQQFHMVSTETIIRKQMHAMVYTGPLKVQQCKNYLDSLVASLSAAVSNLKKIIKDTAAIDLETKEKFGVYDVCLKKWLVKPLSKGHAWGVVMDSDYKCFVALLTYDGENIVCGETWRRVAVSSESLVYSDMGKIRAIRSVLKDGEPHISSAKVTLVDGVPGCGKTKEILSRVNFDEDLVLVPGKQAAEMIRRRANSSGLIVATKENVRTVDSFLMNYGRGPCQYKRLFLDEGLMLHPGCVNFLVGMSLCSEAFVYGDTQQIPYINRVATFPYPKHLSQLEVDAVETRRTTLRCPADITFFLNQKYEGQVMCTSSVTRSVSHEVIQGAAVMNPVSKPLKGKVITFTQSDKSLLLSRGYEDVHTVHEVQGETFEDVSLVRLTPTPVGIISKQSPHLLVSLSRHTRSIKYYTVVLDAVVSVLRDLECVSSYLLDMYKVDVSTQXQLQIESVYKGVNLFVAAPKTGDVSDMQYYYDKCLPGNSTILNEYDAVTMQIRENSLNVKDCVLDMSKSVPLPRESETTLKPVIRTAAEKPRKPGLLENLVAMIKRNFNSPELVGVVDIEDTASLVVDKFFDAYLIKEKKKPKNIPLLSRASLERWIEKQEKSTIGQLADFDFIDLPAVDQYRHMIKQQPKQRLDLSIQTEYPALQTIVYHSKKINALFGPVFSELTRQLLETIDSSRFMFYTRKTPTQIEEFFSDLDSNVPMDILELDISKYDKSQNEFHCAVEYEIWKRLGLDDFLAEVWKHGHRKTTLKDYTAGIKTCLWYQRKSGDVTTFIGNTIIIAACLSSMLPMERLIKGAFCGDDSILYFPKGTDFPDIQQGANLLWNFEAKLFRKRYGYFCGRYIIHHDRGCIVYYDPLKLISKLGAKHIKNREHLEEFRTSLCDVAGSLNNCAYYTHLNDAVGEVIKTAPLGSFVYRALVKYLCDKRLFQTLFLE

SEQ ID NO: 240 - protein, 775 aa, Turnip crinkle virus
MPLLHTLNTALAVGLLGARYYPEVQTFLGLPDYVGHMKNVVRSVFQGSGLVVVSSDTVGVRGTYSNRGQIGSSLGCILAVPDSGADIEIDLDRLVGTEEEATSCLVEAVGSTADVPRRRVRQKGRFAMHAVNAAKLHFCGVPKPTEANRLAVSKWLVQYCKERHVVDSHIRTIVNTALPRVFTPDAEDIQVVLDLHSVRAHDHRNALAEAGKVRKWWVNLAMHPMTGRSWSRAWRRLCRLPDDQAISFVRXGCLRELVGRETQISRGENPAMRVFPLANPPKVRRIFHICGMGNGLDFGVHNNSLNNLRRGLMERVFYVEDAQKQLKPAPQPIPGIFGKLSGIRRRLVRLAGNHTPVPREKYPSFYKGRRATIYQKALDSLHDRPVSRKDAELKTFVKAEKINFTAKKDPAPRVIQPRDPRYNIEVGKYLKPYEHHLYRAIDAMWGGPTVLKGYDVGELGNIMSNTWDKFRKTCAIGFDMKRFDQHVSVDALRWEHSVYNAGFNCPELAQLLTWQLTNKGVGRASDGFIKYQVDGCRMSGDVNTALGNCLLACSITKYLMKGIKCKLINNGDDCVLFFEADEVDRVRERLHHWIDFGFQCIAEEPQYELEKVEFCQMSPIFDGEGWVMVRNPRVSLSKDSYSTTQWANEKDAARWLAAIGECGLAIAGGVPVLQSYYSCLKRNFGPLAGDYKKKMQDVSFDSGFYRLSKNGMRGSKDVSQDARFSFYRGFGYTPDEQEALEEYYDNLELLCEWDPTGYKEELSDRWILNEFPTTL

SEQ ID NO: 241 - protein, 250 aa, Turnip crinkle virus
MPLLHTLNTALAVGLLGARYYPEVQTFLGLPDYVGHMKNVVRSVFQGSGLVVVSSDTVGVRGTYSNRGQIGSSLGCILAVPDSGADIEIDLDRLVGTEEEATSCLVEAVGSTADVPRRRVRQKGRFAMHAVNAAKLHFCGVPKPTEANRLAVSKWLVQYCKERHVVDSHIRTIVNTALPRVFTPDAEDIQVVLDLHSVRAHDHRNALAEAGKVRKWWVNLAMHPMTGRSWSRAWRRLCRLPDDQAISFVR

SEQ ID NO: 242 - protein, 818 aa, Tomato bushy stunt virus
METIKRMIWPKKEIFVGDFATGVNRTVPVNIFQLVCRVVLRYMRTGKIECDSDSMTKFIVELLKTDCAAKWEWFMKRRQRGDYIVPLSIASIPIIPLLSYATRVRAVSVKAFGNELSFNVRVPRPSVPKKGLLLRLAAGLALAPICALAVYATLPREKLSVFKLRTEARAHMEDEREATDCLVVEPARELKGKDGEDLLTGSRLTKVIASTGRPRRRPYAAKIAQVARAKVGYLKNSPENRLIYQRVMIEIMDKDCVRYVDRDVILPLAIGCCFVYPDGVEESAALWGSQESLGVKXGGLVRLPGVVTQINRDIPSDVLLPQEVLEVRTGPPNAKDRNIFMVAGCPSQARFLVHNHCLKNLKRGLVERVFCVERNGKLARTPQPTKGAFGRLSPFRKAVCEKVGVAHRLGYDGFLSYYSGAKLRTYTRAVESLHITPVSERDSHLTTFVKAEKISTSKGDPAPRVIQPRNPRYNVELGRYLRHMESKLMKAVDGVFGETTCIKGYTADEVGAIFRAKWDRFDKPVAIGLDASRFDQHCSVEALQYEHSFYRAMYPGNKLLGKLLEWQLHNKGKGYVPDGTITYRKEGCRMSGDINTSLGNYLLMCAMVHGYMRHLGINEFSLANCGDDCVLIVERRNLKQIQRTLPEYFLNLGYTMKVEQPVFQLEEVEFCQAHPVQFQGGWKMVRNVRTAMSKDVHCVNNIRDLATRRAWSNAQHHGGLALSAGIPVVETFYSRFKLYDVPRKHQRIDTVTNVHKWRGSGGSYVVTPESRASFWAAFGLTGDEQLALEDRLERWEMDLFGEEGVDAHEPSILDSAVA

SEQ ID NO: 243 - protein, 296 aa, Tomato bushy stunt virus
METIKRMIWPKKEIFVGDFATGVNRTVPVNIFQLVCRVVLRYMRTGKIECDSDSMTKFIVELLKTDCAAKWEWFMKRRQRGDYIVPLSIASIPIIPLLSYATRVRAVSVKAFGNELSFNVRVPRPSVPKKGLLLRLAAGLALAPICALAVYATLPREKLSVFKLRTEARAHMEDEREATDCLVVEPARELKGKDGEDLLTGSRLTKVIASTGRPRRRPYAAKIAQVARAKVGYLKNSPENRLIYQRVMIEIMDKDCVRYVDRDVILPLAIGCCFVYPDGVEESAALWGSQESLGVK

SEQ ID NO: 244 - protein, 2879 aa, Tomato spotted wilt virus
MNIQKIQKLIENGTTLLLSIEDCVGSNHDLALDLHKRNSDEIPEDVIINNNAKNYETMRELIVKITADGEGLNKGMATVDVKKLGEMVSLFEQKYLETELARHDIFGELISRHLRIKPKQRSEVEIEHALREYLDDLNKKSCVNKLSDDEFERINKEYVATNATPDNYVIYKESKNSELCLIIYDWKISVDARTETKTMEKYYKNIWKSFKDIKVNGKPFLEDHPVFVSIVILKPIAGMPITVTSSRVLGKFEDSPSALHGERVKHARNAKLLNISYVGKIVGTTPTVVRNYYANTQKIKSEVRGILGDDFGSKDVFFSHWTSKYKERNPTEIAYSEDIERIINSLVTEEIPKEEIIHFLFGNFCFHIETMNDQHIADKFKGYQNSCINLKIEPKADLADLKDHLIQKQQIWESLYGKHLEKIMLRIREKKKKEKEIPDITTAFNQNATEYEEKYPNCFTNDLSETKTNFSMTWSPSFEKIELGSEVDYNNAIINKFRESFKSSSRIIYNSPYSSINNQTNKARDITNLVRLCLTELSCDTTKMEKQELEDEIDINTGSIKVERTKKSKEWSKQGSCLTRNKNEFCMKETGKENKTTYFKGLAVMNIGMSSKKRILKKEEIKERISKGLEYDTSERQADPNDDYSSIDMSSLTHRKKLIRHDNEDSLSWCERIKDSLFILHNGDIREEGKITSVYNNYAKNPECLYIQDSVLKAELETCKKINKLCNDLAIYHYSEDMMQFSKGLMVADRYMTKESFKILTTANTSMLLLAFKGDGMNTGGSGVPYIALHIVDEDMSDQFNICYTKEIYSYFRSGSNYIYIMRPQRLNQVRLLSLFKTPSKVPVCFAQFSKKANEMEKWLKNKDIEKVNVFSMTMTVKQILINIVFSSVMIGTVTKLSRMGIFDFMRYAGFLPLSDYSNIKEYIRDKFDPDITNVADIYFVNGIKKLLFRMEDLNLSTNAKPVVVDHENDIIGGITNLNIKCPITGSTLLTLEDLYNNVYLAIYMMPKSLHNHVHNLTSLLNVPAEWELKFRKELGFNIFEDIYPKKAMFDDKDLFSINGALNVKALSDYYLGNIDNVGLMRSEIENKEDFLSPCYKISTLKSSKKCSQSNIISTDEIIECLQNAKIQDIENWKGNNLAIIKGLIRTYNEERNRLVEFFEDNCVNSLYLVEKLKEIINSGLITAGKSVTSKFIRNNHPLTVETYLKTKLYYRNNVTVLKSKKVSEELYDLVKQFHNMMEIDLDSVMNLGKGTEGKKHTFLQMLEFVMSKAKNVTGSVDFLVSVFEKMQRTKTDREIYLMSMKVKMMLYFIEHTFKHVAQSDPSEAISISGDNKIRALSTLSLDTITSYNDILNKNSKKSRLAFLSADQSKWSASDLTYKYVLAIILNPILTTGEASLMIECILMYVKLKKVCIPTDIFLNLRKAQGTFGQNETAIGLLTKGLTTNTYPVSMNWLQGNLNYLSSVYHSCAMKAYHKTLECYKDCDFQTRWIVHSDDNATSLIASGEVDKMLTDFSSSSLPEMLFRSIEAHFKSFCITLNPKKSYASSSEVEFISERIVNGAIIPLYCRHLANCCTESSHISYFDDLMSLSIHVTMLLRKGCPNEVIPFAYGAVQVQALSIYSMLPGEVNDSIRIFKKLGVSLKSNEIPTNMGGWLTSPIEPLSILGPSSNDQIIYYNVIRDFLNKKSLEEVKDSVSSSSYLQMRFRELKEKYERGTLEEKDKKMIFLTNLFEKASVSEDSDVLTIGMKFQTMLTQIIKLPNFINENALNKMSSYKDFSKLYPNLKKNEDLYKSTKNLKIDEDAVLEEDELYEKIASSLEMESVHDIMIKNPETILIAPLNDRDFLLSQLFMYTSPSKRNQLSNQSTEKLALDRVLRSKARTFVDISSTVKMTYEENMEKKILEMLKFDLDSYCSFKTCVNLVIKDVNFSMLIPILDSAYPCESRKRDNYNFRWFQTEKWIPVVEGSPGLVVMHAVYGSNYIENLGLKNIPLTDDSINVLTSTFGTGLIIEDVKSLVKGKDSFETEAFSNSNECQRLVKACNYMIAAQNRLLAINTCFTRKSFPFYSKFNLGRGFISNTLALLSTIYSKEESYHFVSTASYKLDKTIRTVISAQQDMNLEKILDTAVYISDKLQSLFPTITREDIALILQNVCLDSKPIWQSLEDKMKRINNSTASGFTVSNVILSHNSELNTIQKQIVWMWNMGLCSHRTLDFVIRYIRRSDVRYVKTEEQDESRNYVSGTMYKIGIMTRSCYVQLIASDHDVAVSLRTPFEILNEREYLFDTYRESIEKLLQKFMFDKVNIIKSKQPQIVFLEPGDACIRMTTDNKMIVKVNATSRQIRLENVKLVVKIKYENVNSDVWDIIEGQKSLVLRLPEVGECFSDMYKTADSETETIKTIKNRLMTSLTFIEAFGNLSQQIKEIVYDDIRETMDEFLMNIRDTCLEGLENCKSVEEYDNYLDEDGFNDTVELFENLLRTHDNFEDEYSPLFSEIVDKAKQYTRDLEGFKEILLMLKYSLINDASGFKSYRATGMHAVELMAKKHIEIGEFNLLGMIQLIKACETCHNNDSILNLASLRNVLSRTYATFGRRIGLNHDLDLQNNLMEKSCDFKTLVLPDIKLSELSREILKENGFVISGENLKMDRSDEEFEGLASFNVLRLDEEEMYEGLIKEMKIKRKKKGFLFPANTLLLSELIKFLIGGIKGTSFDIETLLRNSFRPDIFSTDRLGRLSSSVPALRVYATVYMEYKNANCPLNEIADSLEGYLKLTKSKPKEHFLHGRVKKALIQLRDEQSRTKKLEVYKDIANFLSRHPLCLSEKTLYGRYTYSDINDYIMQTREIILSKISELDEVVETDEDNFLLSYLRGEEDAFDEDEIDEEEDTD

SEQ ID NO: 245 - protein, 2878 aa, Watermelon bud necrosis virus
MNIQTINSFLDASGETTAYLQRIKDEIMLMSNVIEQGYSEGKGVIESGLSSIMSMNYILDKIEDMKSKYHQSSSSIDQREMETEIYLFLDKYKELELMRHDLFGVLAGRRLHFVPKHRSDVFMKDCLMSYIEFCSASVSISNKIDNLDSLKEKLIFQHLTPDNYTIYKETKGEKACLMIYDWKVSVDAVSEGKTSENYYTSVWKTFKDITIDEEPFLERHPIFITIVVLNPSGNMPIVATTCRVVQEFRNSPYKTFNDRKRAAEAAKLISVNSLGQLIGLGADCFRRFYSETQSFKNSLLSKVGKYMNRSSEVFFSHWSCEYRKTNLSNNQISQDIIDLINSLPNDVVGKEILVHFLFGNYLYFKETMSELHLKDRFEGYRSHCKMMRIRPLENEEKLKDYLDRNEHIFESLYETHLKKIKSDVLLRKSKEIEIESIERAFNINAEEYQKEYPGCFTNDLQETKTNFSICWSPMTEELKMNDLNYNNAIIQSFRDALSEQPKLIHHKSYGGAKVDTYFSTTLFNLVRACLVDLSTDTTGHSKATLEDVVDIKDGSIQVKRTEASQRWREIGNVKTRNGNEFTLSPQADTEARKNFFRGLNLMYVDMGKKKKIDIKNELKSKIQESMAQQKNENMDGPSGEYDVSKANIPHQTSLKGITHNKKLIRHDNPDVKYHCESMIESMYVLHGMDERKDKNSKINSVYNEYCSNPSSLFTKGNLIETEMTIAKNIHEVAKELSIYTYSEDMMQMAKGLMVADRFMKKTDFKILTCANTSMICLAFKGDGINTGKSGVPYITIHKVDKSIQPHFVSLYTKELIVSFKSENYFINIMRPQRLNQVRLLSLFKAPSKVPILFSQYSLLSTEIKKWLNQQSIDVFTCPENKIQYLQKILFSSVIIGTVTKLSRMGIFDFMRYARFLPLSDYSNIKEYIAEKFDPDITNVIDCFFVSGIKNLLLKMEGINLSNSIKPLTIDQENDMSGGISDLDIICPITGSTLKTIECLYNNVYLAIYMMPKSLHTHVHNLTTLLSVPAEWEIKFREKMGFMIGDEIKPKKEMFNDSGPFSINGVLNVKTLFDYYKKNITNVGACRSNIEEKEDFLSAPYKIKTLTSSKKCSKADIIKSTEIVAALKSSYGKQPDDIKGSDLYILKGVLKCFDEDRDSLTNFLEVEGLEESKYLHFFTNMMSGDNKILMKTNQDKFYYKSHPLTVETFMKVRYGYFKTTTVLKSKKVSEELYDLIKEFNKITEVDLEALEKLGRGLKGNRVTFIQLLEFILMKSRTNAGNTDFLVSIFEKMQRTKMDREIYLMSMKTKMMLYFIEHTYKHVAQSDPSEAISISGDYKIKNLASLSYDTITNYNTALQKNLECKMAFLSADQSKWSASDLTYKYILAVIMNPLLTTGEINLMCECIMMYVKLKRVCIPTDIFLNLKRGQTEYGSYGTALSVLTDNLETNTFPVSMNWLQGNLNYLSSVYHSCAMMGYEKAMKKMGNYDFTIRWMVHSDDNATSMVVRGDIKELLAEFNCTSLSELLFRSIQSHFKSYCITLNPKKSYASESEVEFISERIINGAVIPLYCRHLANCSTESSHNSYFGDLMSLSIHITMLLRKGCPNELIPFAYAAIQIQFLSIYSMLPGEENDISTIVKEIDFPLSKREIPICAGGWMYAPIELLSILGPSSNDQLIYYKIILDFFNLKDFSSLKKSVNSLGYIDLRINELFKRIKYQKITNADKKMICMVNLFKTSLMSEDCDSLNVGMKFQSMITQIIKLPSFVSEGSLLKNSSFQDFCKLFPNLKKNTDILNALKPVNLDERSLEELNESKFLSQIQLEELSRHMASHPESFLIAPMNDKDYILTNLYTYSSVSKRNQMLNQSTEKLALDRILRSKAKTFLDPNSKEMVSYKENMSMKMREIMSYAGNDFKIINTISSLMVRDMNFEMVVSLMENTVANASIPKANYNFRWFITEKVPSVIEGSPGLIVMSAVYGMDYLIELGLKKLPLTETSISILHDIFGNRKTFDDVKECIQNVKKQYKTEEFQNADVLKRYVLSINYMIQSQNKLLSINTCFSRKNFPFYSKYNLGKTFITNTLAIWSTIYSRLTNINFYTNLNFVIDRSSRLIISLQRDMNLEKLIDCCAYVSDRLQSLFPDMTVESIRQVLCRLNFNGVDLMKKMKSEIAEVKRAINNIKTSTHVTLSFRPQMIAMSKHAAWLYNFGYINEKEFKFVIDQIRQSEVHYIKTDEQDVRGYYVSGHTYKIGIKTQHNYGQLAMSNQDVSIHLHSPYEYKREDDGKIWDVHVRSVYKLLQKLLMDKQSVIKAFLNIRTELMPNQFCIHESSNKTLLILINDTTRPISLERIKFKGDIKYIPSSDFAWDMMSNQSKYRLRQAETGECYTELYKLIDNNDNLMNTILTNLKKSLEYGNEMENLIEQSIQGIDDADTIEYIQESVDQIHKLAIEGLETCQTSDEFENYLKRVDFQSTVDFHKDLLEQIVEEKYGSAERLDVAVEKLTKWTNSLSTFKDVCTMLKFSMVNDSKGIKTYKANGADFHSLSASEVMTSQGFDLFELLKLIKACEACHTSNSVLNLIAFKNIKNKTFIPGFKRHLPNTVHFDYEMKLNNEVMNKFYEYKTISLQDIKVSDRVKRVLETNGFSITGHNLKLEETNLELNPVEIIDDSSTYDQVAKQMRLTKKKSSYLIPANTLLLGELMKFLMLCIKGEEHDIMKLLRSHFAMQPVRENRLLCIQDAVMTCRISGYIQRHFLNDKKEIVLLGVADSLENFISLATPNYATQEPFKAEALIKKALAEVYDSGKYKILKNIRNYIVDDVEFLTEKCLYSNITNEEISNMIFNAVSKIDLELSNLKPKKRKKRLDLHDVFNGFLGSDATTSEQQ

SEQ ID NO: 246 - protein, 1844 aa, Turnip yellow mosaic virus
MAFQLALDALAPTTHRDPSLHPILESTVDSIRSSIQTYPWSIPKELLPLLNSYGIPTSGLGTSHHPHAAHKTIETFLLCTHWSFQATTPSSVMFMKPSKFNKLAQVNSNFRELKNYRLHPNDSTRYPFTSPDLPVFPTIFMHDALMYYHPSQIMDLFLRKPNLERLYASLVVPPEAHLSDQSFYPKLYTYTTTRHTLHYVPEGHEAGSYNQPSDAHSWLRINSIRLGNHHLSVTILESWGPVHSLLIQRGTPPPDPSLQAPPTLMXSDLFRSYQEPRLDVVSFRIPDAIELPQATFLQQPLRDRLVPRAVYNALFTYTRAVRTLRTSDPAAFVRMHSSKPDHDWVTSNAWDNLQTFALLNVPLRPNVVYHVLQSPIASLSLYLRQHWRRLTATAVPILSFLTLLQRFLPLPIPLAEVKSITAFRRELYRKKEPHHPLDVFHLQHRVRNYHSAISAVRPASPPHQKLPHALQKAALLLLRPISPLLTATPFFRSEQKSMLPNAELSWTLKRFALPWQASLVLLALSESSILLHKLFSPPTLQAQHDTYHRHLHPGSYSLQWERTPLSIPRTTAFLPFTPTTSTAPPDRSEASLPPAFASTFVPRPPPAASSPGAQPPTTTAAPPTPIEPTQRTHQNSDLALESSTSTEPPPPPIRSPDXTPSAPVLFPEINSPRRFPPQLPATPDLEPAHTPPPLSIPHQDPTDSADPLMGSHLLHHSLPAPPTHPLPSSQLLPAPLTNDPTAIGPVLPFEELHPRRYPENTATFLTRLRSLPSNHLPQPTLNCLLSAVSDQTKVSEEHLWESLQTILPDSQLSNEETNTLGLSTEHLTALAHLYNFQATVYSDRGPILFGPSDTIKRIDITHTTGPPSHFSPGKRLLGSQPSAKGHPSDPLIRAMKSFKVSGNYLPFSEAHNHPTSISHAKNLISNMKNGFDGVLSLLDVSTGQRTGPXPKERIIQIDHYLDTNPGKTTPVVHFAGFAGCGKTYPIQQLLKTKLFKDFRVSCPTTELRTEWKTAMELHGSQSWRFNTWESSILKSSRILVIDEIYKMPRGYLDLSILADPALELVIILGDPLQGEYHSQSKDSSNHRLPSETLRLLPYIDMYCWWSYRIPQCIARLFQIHSFNAWQGVIGSVSTPHDQSPVLTNSHASSLTFNSLGYRSCTISSSQGLTFCDPAIIVLDNYTKWLSSANGLVALTRSRSGVQFMXPSSYVGGTNGSSAMFSDAFNNSLIIMDRYFPSLFPQLKLITSPLTTRGPKLNGATPSASPTHRSPNFHLPPHIPLSYDRDFVTVNPTLPDQGPETRLDTHFLPPSRLPLHFDLPPAITPPPVSTSVDPPQAKASPVYPGEFFDSLAAFFLPAHDPSTREILHKDQSSNQFPWFDRPFSLSCQPSSLISAKHAPNHDPTLLPASINKRLRFRPSDSPHQITADDVVLGLQLFHSLCRAYSRQPNSTVPFNPELFAECISLNEYAQLSSKTQSTIVANASRSDPDWRHTTVKIFAKAQHKVNDGSIFGSWKACQTLALMHDYVILVLGPVKKYQRIFDNADRPPNIYSHCGKTPNQLRDWCQEHLTHSTPKIANDYTAFDQSQHGESVVLEALKMKRLNIPSHLIQLHVHLKTNVSTQFGPLTCMRLTGEPGTYDDNTDYNLAVIYSQYDVGSCPIMVSGDDSLIDHPLPTRHDWPSVLKRLHLRFKLELTSHPLFCGYYVGPAGCIRNPLALFCKLMIAVDDDALDDRRLSYLTEFTTGHLLGESLWHLLPETHVQYQSACFDFFCRRCPRHEKMLLDDSTPALSLLERITSSPRWLTKNAMYLLPAKLRLAITSLSQTQSFPESIEVSHAESELLHYVQ

SEQ ID NO: 247 - DNA, 3199 bp, Solanum lycopersicum
  source 1..3199: mol_type = genomic DNA
tcccaaaactcattatttaattttcttctttaacaaagttgacgagacaaaagcaaaatatatacaggaaaaatgggtgatccgttgattgaagaaattgatgttctggatgcacctttaccatattctgtagagacgatgcttgatagaatctgcaaggagcaggggcaaaaaccaccgtgtactggcattagaaggaggctgagctctattggtgaaaaagggtcattagaaatgctcaaaataatatcacgtcgtcctatcaagaagagtctctctgcttttcttgtttacatgattgatcgctacccggattgtctctcctcttcctctagccccttcaattgtctactcaaacgctcttcttcccctcgtctctttccatctccagagggtaaacgtttacaaggtgaaagttcttctaaatcaaagcttgagatgggcttattggcctgtgcaagccctcagaaagttgctcgccagttatcattttgcgaggagcctgaatctaactgtagaagaacctccccttatgtcagccaacagttgatgatcctcaatgaacttgaatttagaaaattgtttctggtactgagctacattggatgcaacaagttggaagatgttatatcccctcaaattgctgatgatattgtaagaaagaaaaatctttccatgactgattttgaatcagaaatttggaatgcttttggaaaagcatgttatgctgtgtcagatagatcaaagtacttagactggaattgcagaaagacacatatctactattgccacattaagcagaacggatactgttccttcaagggtccatacttgaacacattaaggactcacttacagagagccctgggagatgacaatgtactgattgtaaaatttgttgaagatacaagttgtgccaatataattctcgaggaaggcattcttgttggcttgagacgttaccgtttctttgtgtataaagatgataaagagaggaagaaaagtccagctatgatgaagacaaaaactgcttctttgaagtgctactttgttaggtttgagtccattggaacctgcaatgatggagaatcctatgtattttctaccaaaacaatcagtcaagcaaggtgtaaattcatgcatgtgcatatggtttctaatatggcaaaatatgcagccaggctttccttaattctatcaaagacgattaagcttcaaacagatcttgattctgtcaccattgaaagaattgaagatatactttgtcgggatgaaaatggttgtattattcaagatgaagacggcgaacctcgtatacatactgatggtactggtttcatatcagaagatttagctatgcattgtcccaaagatttttcaaaagcagaatatataaaagatgaaaattatgagaattttgttgatatcgtggaccttgatgacgtgaatgtagaaagaagagtgagtgtatctcgcaataggaaaccgcctttgttgatgcagtgccgtttgttcttcaatggttgtgctgtgaaggggacttttcttgtcaatagaaagattggatcacgaaaaattcatattagaccctcaatggtgaaggttgagatagacccaacaatttcaagtataccaacttttgactcattggagatagttgcaatcagtcatagaccaaataaggcatatctgtccaagaatttaatctctctgctgagctacggaggagtccataaagaatactttatggaacttttgggaagtgcgctggaagagacgaaacaagtatatttgaggaaacgtgcagctctaaaagttgctatcaactatagagaaatggatgatgaatgtctaacagcaaggatgatatcgtctgggatacctctcaatgaacctcatctccatgctcgcttgtctaggcttgcaaagattgaaagaactaagcttagaggaggaaagcttcctataagtgacagtttttatcttatgggaacagctgaccccactggtgtactggaaagcaatgaagtctgtgttattctagataatggccaagtatctgggcgtgttttggtctatagaaatcctggtcttcactttggagatgtacatgtgatgaaagcgcgatatgtggaagagcttgcagatgttgttggtgatgccaaatatggtatatttttttcaactaaaggcccgaggtcagctgctactgagattgcaaatggtgactttgatggtgatatgtattgggtttccataaaccgtaagttggtagattcttatacaacaagtagaccatggattcgcatgcattcaactcctaacgcagttagcaaaaaaccaagtgaattttcagctgatgaattggaatatgagctttttaggcaatttctggaagcaaagtctaaaggtgccaatatgtctctggcagctgatagctggctggcatttatggatcgtcttctgacgctgcgagatgataatgtggatgatatgcatagcttgaaaggcaagatgcttcacctgattgacatctactatgatgcattagatgcacctaaaagcgggaagaaggttagcatccctcattatctgaaggcaaacaagttcccccactatatggaaaaagggaactcctgcagctatcattcaacttctattctgggtcagatttatgatcatgtcgactcatatccagatgaagatttgtgtataacagaaatctctaaactgccttgctttgaagttgaaatccctcaaagatgcatgacattgtggagaggaagatatgaagagtacaaaaaggatatgacacgggccatgaactttgattgtgaactaagaatcacctcttgcaatgaagttataaagaagtacaagatgttgctatatggtgctgtggagtttgaacaaacagtaagaaagactgaagacattttcgacgaggcccttgcaatatatcatgtaacatatgataatgcaaggatcacatacagcatagagaaatgtggttttgcttggaaagtagctggttctgcgctttgcaggatccacgccatgtatcgcaaggaaaaagacttgcccattttgccatcggttttgcaggaaatactctagacgtattgtaacattgaagtgatcaataaatatctacttagcattctattctatgtgatgacgtccaaatttacttctcaaa

SEQ ID NO: 248 - DNA, 4902 bp, Arabidopsis thaliana
  source 1..4902: mol_type = genomic DNA
gttgttgctgtctcctctctcaatggctacctcctgcgactgaaacggtaaacctttattctctttagattcgtgtgtattcatcagtatatggtcatgttacaataatatattgcttattaactgatcaatctgttactgtcctgccctgcttactatagtagacagtttctgtggttttgtaatacttaggcatgtgttaactattattagaggacttacagtgagttaaggtgtcttcgtgtgtgtttctctcaaaatgatatatttgttactctgtacatatatatatatatgctcgtggaatcctgatgagaatttggttacagctttatcaatcctctaaatagttttcaacagtgcaaggttttgtgttcctctcttgaaaatatagtctctgaagtgttaacgagctctatatgactgtttgcagagttcaggcagcaatgtaaatgagctggagaatataagcaatgataggactgagtcaatagttcaagaacgtgaaggttctgacaactaagcaaactgcttcttcaatttggttcgataactgtagataaattgtgataaaatatcttttatttgatcaatcattacattattgtagagaatcctcagccaagagattggtagctagatagataaggttgacttggagtcaacttcttccttatagctttcttcatttaatatagtaaacgtttttaactcatttttttccagagaatctgtacccttggcgttcttgtactggttcatcgtagatgattctcgacgactagttgttatggctgaagcatttgtgtcgtttggacttgagaagctttgggatctcctgagtcgagaatcagagcgattgcagggaattgatgggcaacttgatggactaaagcgtcagctgagaagtttacagtcgttgttgaaagatgcagatgccaagaaacatggaagtgatagggtgaggaatttcttggaagatgtcaaagaccttgtttttgatgctgaggatataattgaatcctatgttctgaacaaacttagtggaaaaggaaaaggggtcaagaagcatgtgagacgacttgcttgcttcttgacggatcgccacaaggttgcttcagatatcgagggtatcactaagaggatctctgaagtgattggggaaatgcagagttttgggatacaacaaatcattgatggtggtcgttcgctgtctcttcaggaaagacaaagggtgcagagggagatccgacaaacgtatcctgacagttctgaaagcgatcttgtcggggtggagcagagtgttaaagaattggttggtcatttggtggagaatgatgttcatcaagtggtttctatagctgggatgggcggtattggtaaaaccactctggctagacaagtctttcatcatgacttagtccggcgtcactttgatggattcgcatgggtctgtgtttcccaacaatttacacagaaacatgtttggcagaggatcttgcaagaacttcagccacatgatggggatattttacagatggacgaatatgcacttcagcgtaaactctttcaattgttagaggccggtagatatttagttgtcctcgatgatgtatggaaaaaagaagactgggatgtaataaaagcagtgtttccacggaaaagaggtgagctcttatggtacatacatgaagcactttttcttcttaattcataaaagtgattgttaaaaaagaaatatatagaataattgccttttttattccctagcatgagaaacacaaatatttttgcaggttggaagatgctgcttacttctcgaaatgaaggtgttgggatacatgctgatccaacatgtttaacttttagagcaagcatccttaaccctgaagaaagttggaagctctgtgagagaatagtattccctaggagagatgaaactggtacatatcttattatataatgtttagtttctctaacttttaagaaaaatacatttacatatactaatttacatgtatatatttatattattttataaattttaattttccttaaccaaaaagtaatatttgtatacatattgctattttttccttactattagaacaactaactaaaaacgtatggtaatccatatgctaatttaggcatgtataaaaaaaaaagtcaatggtaatcttgattttgaccaaaaaataattaatttaattagcatgaacaatgagtgttgttaaggttcaaaaggacaatataattattaaacattaatttaattggataacaattaaaaaaattaactattaatcctagtacagtaagtcagtaattacgaatcttgaaaattggttttggtttttttcttcctattttttataggtttattcaaattagaaatatcgaattatctacttttatggtttattcatgattggtttgattaaaatttaacgtaataaaatcaactaaatttgaaagaaacatgtattgattaacccgtgattacacgattccttgtaataaagttcaaatagaatactaagaccaagaatctagtgtattattttaatttggcagctcacatgttgaaatgtattagcttgtgatattgtgcagaagtaaggcttgatgaagaaatggaagccatgggaaaggaaatggtcacacattgtggaggactaccattagctgttaaagcgttgggaggcttgttagctaataaacatactgttcctgagtggaaaagagtttttgacaatattggatctcaaatagtaggaggatcgtggttagatgacaacagtctcaattcggtttaccgaatattgtctctgagttatgaagatttgccaacgcatttaaagcattgcttccttaacctagcccatttccccgaagattccgagatatctacgtatagtttgttctattactgggctgcagaagggatttacgatggatcaaccatcgaagatagtggagaatactacctagaagagctagtgaggagaaatttggttattgcagacgacaactatttgagttggcaatctaaatattgtcaaatgcatgacatgatgagagaagtatgtttatctaaagccaaagaagagaacttcctacaaattatcatagaccctacttgcacctctaccatcaatgctcaatctcctagtagatctcgcagactcagcatacatagtggtaaagcctttcatatattgggacacaaaaacaagacaaaggtgagatctcttatagttccgagattcgaggaagactattggatacgatcagcttcagtcttccacaacttaacattgctcagggtgttggatctttcttgggtaaagtttgaaggagggaagttaccttgtagcattggagggctcatccacttgagatacttgagtttatacgaggctaaggtatctcatctaccttctactatgcggaacctaaagcttctgctctatttgaacttacgtgttgataccgaggaaccgattcacgtgccaaatgttttgaaagagatgatacagttgaggtacctttccctacctcttaaaatggatgataaaaccaagttggaattgggtgatctagtgaacctggagtacttgtatggtttctcaacgcaacacagtagtgtgacagacctcctccgtatgactaagctccggtatctcgctgtatctttgagcgaaaggtgcaattttgaaactctatcgtcatctctccgcgaattgcgaaacctcgagacgcttaatttccttttttcgctcgaaacatatatggttgattatatgggagagtttgttctggatcattttattcatctaaaacagttgggattggcagtacgtatgtcaaagattcctgatcaacatcaattccctccccaccttgtacacttatttctaatttattgcggcatggaagaggatccaatgccaattctagaaaagttgcttcatttgaagtcggttcgtttagcacgtaaggcattcctagggagcagaatggtgtgctcaaaaggcggatttcctcaattatgtgttatagaaatatctaaagaatcagagttggaagagtggatagtagaagaagggtcgatgccatgtcttcgtactttgactatagatgattgcaaaaagttgaaggaacttccagatggactcaagtacataacatccttaaaggaactgaagattgaaggaatgaagagggagtggaaggagaaactggtaccaggtggagaagattactacaaagtccaacacattcccgatgttcaatttatcaactgtgaccagtagcaggtaaaaaataaattgtatagtgttcactttgtttttttctgttgttgttggattcgtgtgaaagtcatgtggacagtctcaactattatacattgttctaacatcgatcatctttgaaataagatgcaggaaagaccaagaagcgagccaaattctcttatattgggagatatagacgctgcttcaacagagtcatctgctgatcaacaggtttttccgaagaatatctggtattgcttatgaagaatacagattctcaagtattaacgattatgtttccagtcttggagctctcgctttttcagtgcatcgttatgttgtgcggctcagaactatattatagaaacaatgcttatattgttgtttgtttttgatgtggatgcatggaacatgcttgagaactcttttacaaaatggagaaacgaaacttgtaaaatttggatattttatgtttgttgtaaaatttggatattttgtgtttgtgtaaaatttggatattatatgttttgctttctcgtttgtgatttaacacagttcgttttgtaagctttatttacagtttacaccatcaaatcttgtc

SEQ ID NO: 249 - DNA, 2931 bp, Arabidopsis thaliana
  source 1..2931: mol_type = genomic DNA
tttctcttcttttttttccctcacttctccaacaaactcgatttcccgatttcgtcgcctcttctcgtctctccgctctcctcgccgcgagtctgtttcgccgccgtctatctcccaattccggtacatcctaaaccatttccccttttaatccaacctgtgttgatttctaatcgcgattaatctcagttaggtttaattgcttgatctcagttgaaattagggcgtaatctcattactaaatgtagcaaaaatcgacaatatagtctcgtctctctgttatagcaatcaatttgtgagattctgaattttggcagaatcctaattctgaagtttggctaatatagaacctgtaattgtgttttttcatttatgagatgttttattaactttgttagtcacaaattgatttcatgtgtataatgttcattatttcgattttgttctcgtatgcgatattacgttcttggctgtgatatctgaagtaaagctgttgtaatctaagtttttcttctcttgattttaaacagtgaccgttgttgtttagtgaatcgatgatttacactgctatcgacaatttttacctatccgacgagcagctgaaggcttcaccttcgaggaaagatgggatagatgaaacaactgaaatctctcttagaatctatggatgtgatctcatccaagagggtggaatattgctcaaactgtatcctttttcttggtctaattattaagcaagactcaaatgttacgtagctgtgattttcttaacttagattgtttattttagaccacaggcagttatggctactgggcaggttctgtttcagcgattctattgcaagaagtctttggctaaatttgatgtcaaggtaaattattttgtttctttcttctagttttgtgtgtttatgaaagtatgataattctttaggagtgtatatactcctgcctatgaccataatgatttgatatgtagtttaatttttacagatagttgctgccagctgtgtatggcttgcatcaaaactggaagaaaaccctaaaaaagctagacaggtcatcatcgtattccacaggatggagtgtcgcagggagaacttgccattagaacatctggatatgtatgccaaggttagtttgcaattgcatttgtcatattgaatgttttttttcgtatattttgtttctactcatgggatagctttatttggaagtacttttatgggatctcatcttttttcctacttgttaaatatctgcagaagttctctgagttgaaagttgaattaagcagaactgagagacatatactgaaagagatgggttttgtttgtcatgttgaacatcctcacaagttcatatcaaactaccttgccacattagaaacacctccagaattgaggcaagaagcttggaatttggccaatgataggtaatctctattctcaaaatcctaatatggatattatttcatatgatttcctaatagttagctacacatcatagtgttgataggttttagagttgatgtttatcctgaagcttggcatttctcctgttctagtttgattttgagtatgtttgttatactttctcaatatctgataattcctttatgattttatcttaatctcatgatatgtctataatgcagtctgcgtacaaccctctgtgtaaggttcagaagtgaggttgtggcttgtggggtagtgtatgctgctgcccgtaggtttcaagtaccactccctgagaatccgccgtggtggaaagcatttgatgcagataaatctagtattgacgaagtgtgtagagttcttgctcatttatacagtcttccaaaggctcagtatatctctgtttgcaaggatgggaagccatttacattttctagcagatccgggaattctcaaggtcaatcagcgacaaaggtgaggtagatcgctttcttggttttgtaatttttgtgaaaacatgagattattgtccatattactgctattatagactcttaaagttgagtgcgtttcttacacagtagtaaacagagtttctaccaccacattgcatgttatatagtattgaaaaagggctgtctactttattatttcggcttgggaaaatctgcaatccaagtgcattttctatgtctgtaatcagagctaggtttgaagtgcttttaacactgttacaggatctgttgccgggagcaggcgaggctgttgatactaaatgtactgcaggatcagctaataacgacttgaaggatggaatggttactacaccacacgaaaaggctacagattccaagaaaagtggtaccgagtcaaactctcagccaattgtaggagactcaagctatgaaagaagtaaagtaggagatagagaaagagagagtgatagagagaaggaacgaggtagagagagggacaggggtaggtctcacagaggcagagattctgacagagacagtgatagggagagagacaaactcaaagatcgaagtcatcatcggtcaagagacagattgaaggattcaggtggacattcagataaatcaaggcatcattcttctcgggaccgtgactaccgcgactcatcgaaagaccgtcgtaggcaccattaagccaatcttcttgtcatctacatccccttgagcctacttgatgttaagacagtatagtgttgtattgtgttaagagtcaaaacccatgtgtacttaatcacatgctaagatcacgttggttcgacatataaaatcgagaaagtctgatatgtttctaatttggaattttgtgaaaagtgccttaaactttggaaaagtggttttttgacttttgacttgtgagttgttgtgaccgagcagagaggagaataatagtatccaaatctgacttgtggcacatgatggtaggcttaaagcacgttcaa

SEQ ID NO: 250 - DNA, 2681 bp, Brassica rapa
  source 1..2681: mol_type = genomic DNA
gagaacgattcgggaagtggcagttcaaatcttgtgttgcagctggtaatggcttttgcctcttcctcatcgagtattgttttaagcaaatgtgaattcgatgtcttttctttccatggtgcagacgtacgtaagaattttttgtcccacgtgcttatcgagctcaaatcaaagggcatagatgttttcattgacaacgatatccgccgatcgaaaagtataggaccttttctaattgacgcgatcaaggggagccgggtcgctatagtactgttatctgaagattatgcctcctcaacttggtgcttgaatgagcttgtggaaattatgaaatgtagaagggagttcggtcaaaccgttatgcccatcttttaccaggtcgacccatcggatgtaaagaaacaaacaggcgaattcggaaaggtgtttcagaaaatatgcaaggggaaaacagaggaaaagattcgtcgctggaaagaggcactcactgaagttgcgaacatcgctggtttccatagtagcaattggaagtctgaggccgaaatgatagagaaaattgcaaccaagatctccaacaaactaaatctgtcagtcccgtgttcgtattgcgacggcttagtaggaatagaaagtcacatgacagagatgcgaagcttgctttctctcgattgtgacgaagtgcggaaggttgggattctaggtatggcgggcatcggaaaaacaactatagctagatccctgtacaacaggcattgccaaaattttcagcgtttcgatggttgctgttttctttcaaacgagattgacgaattgaagcttcaaggtatcgatcagctccaacagaaactactgataaagttattggacgatgagacccttgaagtcggcgcctcgctcggagcacacaaagtactaaaggaccgcctgttaaataaaaagttgttcattgtgcttgataacgttgacaataaacaaatcagtctcctaataggggaggcgggtaagcagctgtatcgagatggcagccggattatcataacaacaagagacaaaaagttattggataaagtcgtagacggaacttacgtggttcctaggcttaacgggcgtgaagctctcgagcttttctgctcgaaagcatttggtaatcattatcccaccgaagagtttgtcgatctgtccaacgacttcgtatgctacgcaaaaggcttaccattggcgcttaagctcctaggaaaagggctgttaacacacgatattaattattggaagaaaaagttggaatttcttcaagtgaacccggacaaagagctccagaaggaactaaaatcatcgtacaaggctctggatgacgatcaaaaaagtgttttcttagacatcgcctgttttttccgcagcgagaaggcagattttgtctcttccatattgaaatcagacgatattgacgcgaaggatgtaatgcgagaacttgaggaaaaatgcctcgtgatgatctcgtatgaccggatagagatgcatgatctactgcacgctatgggtaaggaaattggcaaagagaagagtatcagaaaagccggagaaaggcgtcgcttaagcaattgtgagttgcttctcgacatactatctctgttattcgcaaactccgggtcagaatgcttgaagggtgattttaaagcgcttaatgagattaaggctatcaaaggcttccctgccgcattttcgatgctcggagacgatccctgtggggacggtgatttcctaaagtttcatggcagtcactgcagcactcagggagacaaccgagttgtcaccgatcatgaattccaagcgtctaaaatagtagggccatttccgattgctgtgacaaatctgttagacttgatgcggcttgatctccacaacaagctacctggtaaattcgaccccaaggagctgaaagatttatccttgagatggaatcatatcaaggacgttataccaccggaaattggcgagcttgaaaggctccgtcacctagatctgggatttaactcattcaaaggggagatccctaaggaattagccgcattgcccgagcttcgcgcgaaaaatctcgaagagctagacctggaaggtcgaataccagctgagtgtggctcgttacagaacttgcggcatcttgatgccggaaataaccacctcgtcgggaatactagagactgcattaggtttgatggtctattcaagggctttaaaatcaagagtctgaaaaacttaatattgagcggatgtattaaggcaaaagacttccatatcatatctgaagagattgtataccttcacctcgaaaagtttatctgcaatataccgttcgcgattgctcatatccacaaactaatatttctgaacttagatcataatcaattcttggggattcctgacgccttttataagcttaaattcctcaaggagatgtacatcgaaggtaaatccggcgtggagtcactacccacccacaaggttctggaagtctcggatgcagactttgcggtatggtaacgccctagacgatttctacctcctttgatctgttaaatctctcggactgacgaaagagaactttcttcaccactaatctatatttctccttaatcaaaaaaaaaaaaaaaaaaaaaaaaaaaaaaaaaaaaaaaaaaaaaaaa

SEQ ID NO: 251 - DNA, 5238 bp, Capsicum annuum
  source 1..5238: mol_type = genomic DNA
atggaaatcgtaactgctattttgagcccagtcgcagaacacttgatgatactgccagttgcgcgacagattggatatttgttttactataggcgcaacatcaggtctttggaaaatgaaaataagaagctggagggtatcagaagcggggtgcagcacagaaaggatgctgaatggagaaacttacaagtcatgccaccccatgtcgagaattggttaaaggatgttaatgaaactactgctgaggtggcggttttactacgacgtagagctgaggttgaaagaggttgcttctacggttggtgtccaaacttgaagtcacgtcactcgctgagcaggaaagctaagaaaattgaacaggctatgattggtcttcaagatgaaggcacacgttatgctccttcctcctgtccagcaccacttgcagttacagtgatacacagtgatgagtttgactctagaaaacagaaggaggaagaggtcatgacagctttgaaagatgaggggatcactattgttgggatatgtggtatgggtggtgttggtaaaacaacactggctgagaaagtaagagcaagggcaaaacaagaaaggttgtttgattatgttgttgtgctaactatcagtcaacaacaaccagacattaaaaaaatacagcgcgagatcgccgaaggagtcggtctatcattagagggggacgatttgttggagcgtggagatcggctgcgttcaaggttaatgcagaaggacagtcgcgtccttgtaattttggatgatgtttggaagaaggttgatctaaagagggttggaattcccagtggtagcgatcgcaactactggtgcaaagtgatattgacgacgcgtctccgagatgtttgtgacgatatggaggctaaaaagaaagtacatgttgaaatcttatgtgaaaatgaagcatggctcctttttaggcagaaagccggtaattcagctgatgatctctctcttcctgatatagcagaagccgttgccaaagaatgcaaggggctgccacttgcaattgttactgttgcaggagcactaaagggtaaaaccaagcgttcatgggaggatgcccttttagaattaaaaaaagcagcaccaagaaatattcgaggagtgcttgcagatgtgtatcaacctctgaagataagctataatcacttagggagtgatgaagccaaggatgcctttttgctttgttccttgtttgaggaagatagtaatatttggactgaagaattacttagatacggaatggggcttggcatcttttcggaactcgaaaatttagaatgtgcaagaaatagggtgtctaatctgttagaaacattgaaaaattgtttcttgttatcccaagttccaggcaaagattatgtcaaaatgcatgatgtggtccgggacatggctatacatattgcatctgagggtaaccatatttttttggtgagccacaatgtgaactcaaaagagttcccaagaaaagactcttacaagcaatacagtcatatgtcaattgttgcaaataaatttgatgcgcgtcccagaccaatatcttgcccacgattgaagcttctgatgttaaaactccgtttcgaagagggtttcaaattacaggatgatttttttgatggaatgagtgaactcagtgtcataaaactgagtggatatgatcgaaactccattctgccctttccatcatccattcagaggttgtcaaatctgagcacgctttggctgagtaatctaaggttggatgacgtgtccattattggggaacttgtcactttagaaattctcagcatcagaggttctgacttacaggagcttccagtggagatcggaaacttggccaatctaactatgttagagtattggaatactggttacagaaaccgtatgaggatttcaccaggggtcttatcaagactagttcgattggaggaactacatatggtgggagtagaagattgtagttactccaccttgagggagctggaatcgttatcgagattgactgcactgacattagatggatgttccaaagatgtgatttacagtaacttgggcctttcctccaagttgacacggtacgctcttaaaatgggtagacactacacgtttacttcattcatgcaaacttacaacaaggctatctatctagacgtcaccaagggcaccccattgggtgattggatccgcctcctgttgaggaatagcgaatgtgtaagttcaagcggaaaggggtccaagaatgtagtgttcgagttgcagaatgtgaaagatctcaggctgtctttttgtgattcattgaatatccactgtcagaataatattccattccccaaacttgaaaggctgaaagtaaatgggtgtgatcatctacggcatcttttttgtgtgtccttggcttgccctgatgaggggacctctcgaaggacacacatcagacctgacgtaatcaagttccccaatttatattacttggaactgggatttctgaaatgcttcacacactttttcagtgacaccgttgagggcattgagttccctctgttacggaaaatgcatttctggagtttacaaaagttccaaaatttctggcctagagtcaacaatgctatcaccgactcaaatcctctttttaatgaaaaggtttcttgtcccaacctggaattgctacgactctgtgaggccaacagcttaactgctctatgctctcaccaacttccaactgcctacttcagcaaacttgtaaccttgaatgtacttaggtgtggaaaactgagaaacttgatgtctccatcagtggccagaggtcttctgaatctccgaatattactattagaagactgtgaatcaatggaagaagtgatcacagaagaggaacaacaaggagatgaaatcatgtgtaatgaacccttatttccccaattggaagagctgggacttgaaaatctgccaaatctgaggcatttcattttgacaaagcaagctcttgaatttccattcctcagagaagtgcagattcgtaactgccctgaaacgaagatatttgtccaacagagatctgtcagtacatcaagtctcaaaagtgtgaacaatgatgatgagttgaaagttgttgatctcaacaaagcgatgtttaattctaaggtttcttgtcccaacctggaagtgctacgactctataaggctaacagcataagtgctctatgctctcaccaacttccaactgcctacttcagcaaacttaaggaactaggagtagggaattgtggaaaattgagacacttgatgtctccatcagtggccagaggtcttctgaatctccgaaaactatggataggagaatgccaatcaatggaagaagtgatcacagaagaggaacaacaaggagatgaaatcatgtgtaatgaacccttatttccccaattggaagagctgggacttgaaaatctgccaaatctgaggcatttcattttgacaaagcaagctcttgaatttccattcctcagagaagtgctgattcgtaactgccctgaaacgaagatatttgtccaacagagatctgtcagtacatcaagtctcaaaagtgtgaacaatgatgatgagttgaaagttgttgatctcaacaaagcgatgtttaattctaaggtttcttgtcccaacctggaagtgctactactctataaggctaacagcataagtgctctatgctctcaccaacttccaactgcctacttcagcaaacttaaggaactaggagtatggaattgtggaaaattgagacacttgatgtctccatcagtggccagaggtcttctgaatctccgaaaactatggatacgagaatgccaatcaatggaagaagtgatcacagaagaggaacaacaaggagatgaaatcatgtgtaatgaacccttatttccccaattggaagagctgggacttgaaaatctgccaaatctgaggcatttcattttgacaaagcaagctcttgaatttccattcctcagagaagtgctgattcgtaactgccctgaaacgaagatatttgtccaacagagatctgtcagtacatcaagtctcaaaagtgtgaacaatgatgatgagttgaaagttgttgatctcaacaaagcgatgtttaattctaaggtttcttgtcccaacctggaagtgctactactctataaggctaacagcataagtgctctatgctctcaccaacttccaactgcctacttcagcaaacttaaggaactaggagtatggaattgtggaaaattgagacacttgatgtctccatcagtggccagaggtcttctgaatctccgaaaactatggatacgagaatgccaatcaatggaagaagtgatcacagaagaggaacaacaaggagatgaaatcatgtgtaatgaacccttatttccccaattggaagagctgggacttgaaaatctgccaaatctgaggcatttcattttgacaaagcaagctcttgaatttccattcctcagagaagtgctgattcgtaactgccctgaaacgaagatatttgtccaacagagatctgtcagtacatcaagtctcaaaagtgtgaacaatgatgatgagttgaaagttgttgatctcaacaaagcgatgtttaattctaaggtttcttgtcccaacctggaaaagctatatatctattcggacataactgctctatactctcaccaacttccaactacctacttcagcaaacttgggacattgaaagtagaaaattgtggaaaattgagacacttgatatctccatcagtggccagaggtcttctgaatctccgaaaactacggataggagaatgccaatcaatggaagaagtgatcacagaagaggaacaacaaggagatgaaatcatgtgtaatgaacccttatttccccaattggaaaagctgaaacttgaaaatctgccaaagctgaggcatttcattttgacgaagcaagctcttgaatttccattcctcaaattagtggtgattcgtaaatgccctgaaatgaagatatttgtccaacatggatatgtgagtacaccaagtcttgaaattgtgaacgatgatgatgaggtaaaagtagatgatttgaacgaatggatacatcagaggttcaattctaaggaagaagatggaagtgaatctgaatcttctcagggagaagattggaatcgaatctga

SEQ ID NO: 252 - DNA, 682 bp, Arabidopsis thaliana
  source 1..682: mol_type = genomic DNA
tacatgtatatatattaatgttatgctattttcgttatgtaaccaaacaaaagagcttttgagttttggtcgtacaaaaaaaaagaaagggaaaatgaagataggacctgtagggaagcatgatgctagaagcactacaattgtaaactgggacgaaggatctcacgatggcttcatctctcagatttttctatctcatggcgtcgctggaattatgtctatccaattccagttcgtgatggacggaaaactcgttttatccgatcgtcacggtccattttccggcaacatgtttgacgttatagagctcaactatccgcatgagtacataactggaatcagtggagagtattacaagtatgaagccaacaatcctcacatgaggtctctcaaattcaataccaacactagcgagtacggtccttttggcacctccggttcgagcaacgacaaatttgcttttaaactcgggaaatctcctcagttcggcggtttccatgggacttatgatgcctcgggactacagtacattggtgtttatctccgcccaaaaacagttctacccaaaatagatacgggcaatgcagaggaaacagagtcaaaaattgtactgggctgaaagtgtttgtatacgactctattctgctgattgtacattcttaattatgaaaattcttctatg

SEQ ID NO: 253 - DNA, 3741 bp, Solanum peruvianum
  source 1..3741: mol_type = genomic DNA
atggctgaaaatgaaattgaggaaatgttagagcacctgagaaggatcaagagtggaggtgatctggattggctcgacatattgcgaattgaggaacttgaaatggtgctaagagtttttagaacctttacaaagtataatgatgttcttttgcctgattccttagtcgaactcacaaagagggccaaattgattggggaaatacttcaccggttgtttggtaggattccacataaatgtaaaactaaccttaatctagaaaggctagaatcacatttgttggaattctttcaaggtaatacggcaagtttaagtcacaattatgagttgaataattttgatctgtcgaaatatatggattgtctggaaaattttctaaatgatgtactgatgatgttcttgcaaaaggataggttcttccattccagagaacaacttgcaaaacatcgatcaataaaggaactgaaaattgttcaaaagaaaataagatttttgaaatacatatatgccccagagataaatggttatgtcgactatgagaagcaggaatgtttggagaatcgaattcagttcatgactaacactgtgggacaatattgtttggcagtattagattatgtcactgagggtaaacttaatgaagaaaatgacaactttagtaaacctccttacctattatcattgattgtgttagtggagctggaaatgaagaagatttttcatggtgaagtaaaggcttcaaagtttactcaatcaaaaactttcaaggacaagaaattaccaaaaggattttcacatcatctccacaatctgttgatgtatctcagaaacaaaaagctcgagaattttcctaataatatcgctgctcaaaatattgatgtggcaatagagttcttgttggttttccttgatgctgatgtgtcaaatcatgttattaatggtaactggttgaaagaggtcttgttaaaagttggagctatagcgggtgatattctatatgtaattcaaaagcttcttcctagatcaataaacaaagatgaaactagcaacataagtctttgctcaatacagatattggagaagactaaagatctgaaggcacaagttgagacgtactacaaatccttaaaatttactccatctcagttccccacctttggtggattgagctttctgaattctcttttaaggaaactgaatgagatgtcgacatctaagtccggattaggtttcctgatgaaacctcttttagggaatttggagaaagagctatcatctcttacatccattttagagaaggagctctcatccattttccgtgatgtcgtgcaccatgaacataacattcctaaagatcttcagaggcgtaccatcaatttgtcatatgaggctgaggttgctattgattctattcttgctcagtataatgcttttttgcatattttttgctcacttcctacaattgtaaaagagatcaagcaaattaatgcagaggtgactgagatgtggtcagcggacattcctcttaatcctcactatgtggctgctccattaaaacatctgccggatcgacatagcaatcttgtaactgatgaggaggtagtgggttttgagaataaagcagaagaactaattgattatctgattagaggtacaaatgagctagacgttgtcccaattgtaggcatgggaggacaagggaaaacgacaattgctagaaagttgtacaataatgacattattgtttctcgctttgatgttcgagcatggtgcatcatttctcaaacgtataatcggagagagttattacaagatattttcagtcaagttacaggttccgacgacaatggagctacggttgatgttcttgccgacatgttgaggagaaaattaatgggaaagagatatctcattgtattggatgatatgtgggattgtatggtatgggatgacttaaggctttcttttccagatgatggaattagaagcagaatagtcgtaacaactcgacttgaagaagtgggtaagcaagtcaagtaccatactgatccttattctcttccattcctcacaacagaagagagttgccaattgttgcagaaaaaagtgtttcaaaaggaagattgcccgcctgaactacaagatgtgagtcaagcagtagcagaaaaatgcaaaggactgcccctagtggttgtcttggtagctggaataatcaaaaaaaggaaaatggaagaatcttggtggaatgaggtgaaagatgctttatttgactatcttgacagtgagttcgaagaatacagtctggcaactatgcagttgagttttgataacttaccccactgtttaaagccttgtcttctttatatgggaatgttttcggaggacgcaagaattccagcatctacattgataagtttatggattgctgaaggattcgtggagaacactgaatctgggagattaatggaagaggaagctgaaggttacttgatggatctcattagcagtaacttggtaatgctttcaaagagaacttataagggtagagtcaaatactgtcaggttcatgatgttgtgcatcacttttgcttggaaaagagtagagaagcaaagtttatgcttgcagtgaagggtcaatatatccattttcaaccttcggattggaagggaactcgagtgagcttcagttttagtgaagagctttccaagtttgcatctctggtctccaaaacacagaagcctttccatcaacacttgaggtcattgataacgaccaatcgagcaaaatctattaatgatattttctcctgtcagattagtgaattgcgacttcttaaagtcttggatttgagttcttatattgtggagtttttgtcgttagctacattcaaaccactaaatcagctgaagtacctcgcagttcaggcttttgaattctattttgatccaggatcacatcttccccatatagaaactttcattgtaatgaatcttccttattatgatatattgttaccagtgtctttttgggaaatgaaaaaattaaggcatgctcattttggtaaggctgaatttgacaagcaggggctctctgaaggatcctctaaattggaaaatttgaggatattaaagaatattgttggatttgatagggtggatgtgttatcaaggaggtgtcctaatcttcaacaacttcaaatcacatattttgggaataatgaagagcctttttgtcccaaattggagaatcttacccagcttcaacaacttcaactttcctttgcgcgtccccgcactctatccgggttacagttgccttcaaatttaaataagttggtacttgaaggaattcatataggatgtgttattcccttcattgcgggactaccaagcctggaatatctccagttacatgatgtgtgttttcctcaatcagaagagtggtgccttggagatatcacgttccataaacttaagttgttgaaactggtaaagttaaatatatcaaggtgggatgtctcagaggaatcatttccgttgcttgaaacactcgttataaagaagtgcattgacctagaggagattccacttagctttgctgatattccaacattggaacagattaaattgattgggtcctggaaagtatctctggaggattcagctgtgagaatgaaggaagaaatcaaagacactgaaggatgtgatcgtttacacctcgtcaaacaacgctcagattga

SEQ ID NO: 254 - DNA, 7158 bp, Nicotiana glutinosa
  source 1..7158: mol_type = genomic DNA
attttttcacatacagtttcttactcttttcagagaattaacgttgagtccatggcatcttcttcttcttcttctagatggagctatgatgttttcttaagttttagaggcgaagatactcgaaaaacgtttacaagtcacttatacgaagtcttgaatgataagggaataaaaacctttcaagatgataaaaggctagagtacggcgcaaccatcccaggtgaactctgtaaagctatagaagagtctcaatttgccattgttgttttctcagagaattatgcaacatcaaggtggtgtttgaatgaactagtgaagatcatggaatgcaaaactcgatttaagcaaactgttataccgatattctatgatgtggatccatcacatgttcggaaccaaaaggagagctttgcaaaagcctttgaagaacatgaaacaaagtataaggatgatgttgagggaatacaaagatggaggattgctttaaatgaagcggccaatctcaaaggctcctgtgataatcgtgacaagtgagttaaaaacatataagctgaatactttgcattcaaatgagttaaacataatcttaaataaatttttcaattttttggaataaattgatagttgattatatatgtttctatcagttaattacaaactcaataacattattacgtagataaaatttttattagttcttcaaagagtttgatttatgtgcacactctttgtatatatcacaatctttttacttttgtaggactgatgcagactgtattcgacagattgttgaccaaatctcatccaaattatgcaagatttctttatcttatttgcaaaacattgttggaatagatactcatttagagaaaatagaatccttactagagataggaatcaatggtgttcggattatggggatctggggaatggggggagtcggtaaaacaacaatagcaagagctatatttgatactcttttaggaagaatggatagttcctatcaatttgatggtgcttgtttccttaaggatattaaagaaaacaaacgtggaatgcattctttgcaaaatgcccttctctctgaacttttaagggaaaaagctaattacaataatgaggaggatggaaagcaccaaatggctagtagacttcgttcgaagaaggtcctaattgtgcttgatgatatagataataaagatcattatttggagtatttagcaggtgatcttgattggtttggtaatggtagtagaattattataacaactagagacaagcatttgatagagaagaatgatataatatatgaggtgactgcactacccgatcatgaatccattcaattgttcaaacaacatgctttcggaaaagaagttccaaatgagaattttgagaagctttcattagaggtagtaaattatgctaaaggccttcctttagccctcaaagtgtggggttctttgctgcataacctacgattaactgaatggaaaagtgctatagagcacatgaaaaataactcttattctggaattattgataagctcaaaataagttatgatggattagagcccaaacaacaagagatgtttttagatatagcatgcttcttgcgaggggaagaaaaagattacatcctacaaatccttgagagttgtcatattggagctgaatacgggttacgtattttaattgacaaatctcttgtgttcatctctgaatataatcaggttcaaatgcatgacttaatacaggatatgggtaaatatatagtgaattttcaaaaagatcccggagaacgtagcagattatggctcgccaaggaagtcgaagaagtgatgagcaacaacacagtaagtaagctaaataatgcaataatatttaatttctaattttatattctaaagacacatagggcagtcaattccagttatttgttcctcttgcttcatagtcttgacggtacatcattttagttgtttactttagttagtaggagatataaaagtaatattaattacctcattagtaaaaaaaaacattaattgcctaatttgtttagtagccgctttaatttacgttccctaattcgttttttcttatattttttagggatggattagtctagtagccacttaatctgtttgatccaatgtctttctttggattaacttgaaaattttatgacattatatataataactcaatcattcattcactttaccattattattttttatataaagttacaatttattggtactgtttcagttacaattactttccaacatggaaaacttataaactggactccaataaacttataagaaaaatgtaataatagaaaataaaattatataattaattacaaaaaagtatttttctgaagtaacatcagtatttcttaaaaagaatccaattaacattgtatcttaaactttggtattgtaaggcgtgagaaagtagtggccttatttcaatttgacgtgaagaatagaatgccttttaacgacataagggaagggggcaagaataagtttctattcagccgggctcgaagcagaaggtagaacgtaatatcttttgttggttcagctcatcaagctattacaaaagagtccgctcatattaacaaacggagtttatacgacatttgaaattatactttgtagactaatgatcttcttgttaccaggggaccatggcaatggaagcaatttgggtttcttcttattctagtactctacgctttagcaatcaggccgtgaaaaatatgaaaaggcttagggtatttaacatggggaggtcgtcgacacattatgccatcgattatctgcccaacaacttgcgttgttttgtttgcactaactatccttgggagtcatttccatctacatttgaactcaaaatgcttgttcacctccaactccgacacaattctctgcgtcatttatggacagaaacaaaggtacaatagcttgaattctattttgttgtcatttatttttctctctaactatctttgtcctttaatttggtgataatgaacaaatattattgttttttgttatgaaacaataaaagaagaagaacaatattgcagagaaagagggagatggaattcttattgaattttggggcgatttacaatggggtaagacccctctatttacaggggaaaaataacttagcctcaaaataaagctctttaaaagatagacattcactctaaatagaattctattataacacttttggcgtacttccttttttggctagaattatgatacatgtctttaaatgaacagaagttgcttttgtaatttatcaggacttatgttgaaacttatgaaaattgttattgtttatgttgtctaatactaaatataaaatacaataatattttatcgtaattttttaaaaatttgtcaaataatgcaaatgaaaaattaaattttttggtcctttaaaaatttgagaatgaaaaagtacgagttatacttcctaaaagtttgatagtgaataatatgtaaaatttaaagaatgactaatattggactaatactttaaaacaaataacttaatatacaaattatagcgagacattttcattcgttgtactgaatgcaagaaagaaaggaaaaaaaaactcatttataatatagtttgtcttctactattttaccttattgcttcaaatttgtattttatcgattttgctatatcttatgatttttttcacggtcaatattcttcttacaagaataaattttatatacctcaagtgttttgtcaatttgataaataatttttcttatatgatgaacttgtaaaataatagaattggattcttttgctaattagttaattcaacgacttaattatttattctcaacattaaaggaaataatttagtttttattaattcaaactcttagtatttgctcattctaattttcagtccaataagaattcaattttcaaatagtaagaaaagtcatatattttgaattttatgttttccgaagcattgtttgtttgtttaactctacgggagttttctaactcacattttgtataataaaattttttgagtagtagttcagtacaactctaatattaatgggctttaaataaggaaatatatattacgtaaaaatttaaatcattttaaagttctttcctaccaagtaaataagggaaaatttaataacaaaaatttagttgattttaaaatcctaaatattagaaaattaacttaaaatataatttcgtctagtgtaaaatttatttttaaagggtaaaaaagacgaacgacattaagagcctttgtaattttaatatagtataaatataaataatttacctttattcagtttcttaacaagtaattttccatatataaaaaataaatttctatattcacacaaaaataatgtgttggccctcgtaattcaaatactatcattcatttcttgtcgagggagtagtaaatacttttaggaaagttagcaataagtaatcaagaaatcaagaaaacagaggtcatttgatgcccacaaatacaaatgaaaaaacaaaacaaatgttacgaaacaataaaagaacaagaatagcctcaaagtaaaactctctgatagacatttactctaaatagaattctatttataacaatcaaaaagtttctacatttatagatagctccactagccaaatattttattattggaatcagcaaaataggttgtttctttttttattctcattctgtctgtgttctaaacagcatttgccgtctctacggaggatagatctcagctggtctaaaagattgacgcgaacaccagatttcacggggatgccaaatttggagtatgtgaatttgtatcaatgtagtaatcttgaagaagttcaccattccctgggatgttgcagcaaagtcattggtttatatttgaatgattgtaaaagccttaagaggtttccatgtgttaacgtggaatctcttgaatatctgggtctaagaagttgcgatagtttagagaaattgccagaaatctacgggagaatgaagccggagatacagattcacatgcaaggctctgggataagggaactaccatcatctatttttcagtacaaaactcatgttaccaagctattgttgtggaatatgaaaaaccttgtagctcttccaagcagcatatgtaggttgaaaagtttggttagtctgagtgtgtcgggttgctcaaaacttgaaagcttgccagaagagataggggatttagacaacttacgggtgtttgatgccagtgatactctaattttacgacctccgtcttccatcatacgcttgaacaaacttataatcttgatgtttcgaggcttcaaagatggagtgcactttgagttccctcctgtggctgaaggattacactcattggaatatctgaatctcagttactgcaatctaatagatggaggacttccggaagagattggatccttatcctctttgaaaaagttggatctcagtagaaataattttgagcatttgccttcaagtatagcccaacttggtgctcttcaatccttagacttaaaagattgccagaggcttacacagctaccagaacttcccccagaattaaatgaattgcatgtagattgtcatatggctctgaaatttatccattatttagtaacaaagagaaagaaactacatagagtgaaacttgatgatgcacacaatgatactatgtacaatttgtttgcatataccatgtttcagaatatctcttccatgaggcatgacatctctgcttcagattccttgtcactaacagtatttaccggtcaaccgtatcctgaaaagatcccgagttggttccaccatcagggttgggatagtagtgtatcagtcaatttgcctgaaaattggtatatacctgataaattcttgggatttgctgtatgttactctcgtagcttaattgacacaacagctcacttgattcccgtatgtgatgacaagatgtcgcgcatgacccagaaacttgccttatcagaatgtgatacagaatcatccaactattcagaatgggatatacattttttctttgtaccttttgctggcttatgggatacatctaaggcaaatggaaaaacaccaaatgattatgggattattaggctatctttttctggagaagagaagatgtatggacttcgtttgttgtataaagaaggaccagaggttaatgccttgttacaaatgagggaaaatagcaatgaaccaacagaacattccactgggataaggaggactcaatataacaacagaacttccttttatgtaagtctctacttctattagctacaaagtcttcttccaaaatcaatactccatccgttccagtttatgtgaacctattttttgttcgtccattctaaaaagaatgacccctttctaaatttggaaataattttggttaaacttataattctaccattaacgagaagcttttataaccacacaaatattctggggccctttttgaattgtttaggaccataaattccaaaagtcctcattttttcttaaactccgtgcccaatcaaacaagttcacgtaaattggaacggagggaatatattttttcttctcattcttttcccctatttacaggagctcatcaatgggtgatgtacatatcaacaacgagttttaaaggattccaacaagtataactttttatgctcaaatcagctccttgtattgtggagaaagctgagtacgagatgaagttgacgtccgttatcctttatgatctctctgttctttgtgttaacttgcctacttcatcagatgaataacagaagcccgttcctctcattctcaacactgtttgcacgtctgttgttacttgttaaaatggatcttgataaagtaataacatctctatattacttataagtggttttaacaagttcactcttttgcttttgcagttcaaatgggaacacaatgtatattgagaactagaacaatgacactgcatatatatatatatatgtatgtatgtaattctcgtcttttggactagaataccttgtttcattatgaaatgaattaacatcttcgcctttgctgac

SEQ ID NO: 255 - DNA, 9837 bp, Solanum lycopersicum
  source 1..9837: mol_type = genomic DNA
ggatccttctcatttttagattacaagttctatactcttgttctttatagaatatttcaattgtgaattgtaatagttgaaataagttctaagtttaataaaatttgaggaaataattcatcaattaacactcatattttctttctactattttcatcacatacatacttcaaagatatatcattttataatatcaattctaattagcatgagaacacgtgcaagagacacgtgttcaacaactaatattactaaaagtgggaacaaaaaaaattaaaatatcaaaatcatattttatttagttatttaaaggtaattttatttttattcatgatatagtgatgttcatattataatactattattgattactttcttttagggggtaaattgtatggcatggaaaaaaaatattttcagagatgatgattcttttatcattagaaaacttatattagattatttatacttgtatactcgggttagaagttttgtgttctatgagtttctttaatcatgtttgtaattatttcaaagtattgatatatttttataattttgttttactatgttattatataatattgtagagaaaatgatcaaatgccccctcaacgtataactggatttccaactacacacttaaactttacgagagtcctatcacccccctgaactatttaaaaatgaaataattatacccttaaaaaagtcataaccagatctattttcacgtgtttgacacgacatcaaattattattatttttagggataatgcccaagtaccccctcaacctatgcccgaaatttcagagacacacttatactatactaaggtcctattacccccctgaacttattttattaataattttttactcctttttagcctacgtggcactatcttgggggcccaacgatggttgactttttttttcaaactagtgccacgtaagctaaaaaggggtaaaaaaaattacttataaaataagttcaggggggtaataggaccttagtatagtataagtgtgtctctgggatttcgggcataggttgagagggtacttgtgcattttctcttatttttaccatcactagaacaccataagtccattattgggtctttgaggaagaaaagtgaataataatttatagctcgttcagagatatttgaattttgctcatttgatacctaaaattaactttaaaaaagtgagggggggaggtggggggttagaagacgaatattgtcattaatgatggtcaccgaagataaacaatgctctcaaggaagatgaggaggagcaacctatgatgtctgccacatcatcttctatggcgacaacaatttcaaatagggagagagattctacgatatttgatggattaactagattaatagctaaaattttgtagatataattgattgattgagatttgatattctattagtaaaaaaaatatttttttggttggtccaatcggagtcaaagtaaaacccatattgattttctcaaattaggtccaaagtatcctgaggtaatataaatatatgtaaatttatctcaattgattttggatgattggtaatcaagagttttatatgagttcgaaaatttattttgaatcagaaatagtcaatccggtgaagatattgatggcaacaagacttagaggtggtgaaagattgagagatttgttaataaggaaagggccaaaaataccctctaactttaatttattgattgactttatcccatccgttaaaatgaagttatttataccctcgcctttaacaaacttgtcatttctaccctccaaattaacggttgccctaaattgaccccaaatcccaatttcaatttaaattacccatttgaaattgatttcctcttttaaaccggacccaataaacttaataacattggtgaaacttcaaactttcttcccaattttgtcaaaaacagagattttacacaataatatacaactcaatatacataaaccaacaaaaatgaaaatgcaccattagaggaattgaatagctattgccatggtacaaatcgtttctacatagatgataccaaataaatgagagaacaccattacattatttggtgctgttttcttgtactccgacaacccacaacccttgagcgatcccaatggtgacaaacacaactgaagaacttcttgcagatgcacattatctccgggcaacgatgacgatcaaaaagcaagaggacgaaacccttctgcctcaatgtttcacctcttcttctgcaccatattttcttcgatattccctactttcaatcttttaatttttcgccattgatttgaaccaatagcccccaatatttcaattttttgatcttggaaaaccatgttggtaattggtagaagacagcatcgttcaaatcgatttgtgtcgattcgttggaatcagaggaaaagtagtaagaatggaacgtaccagttcgtcggaaccggaggaatattaataaaagagaagaaagtgaacgaagagagttatccttaattgagatgattctggtaacttttttgtgacgattctggtaacctttgatggagaaataagaagtcattgttcaagttattgagagagaaagaggagatgctttgttgttatttgtttactataatgggtcaggttggattgagtttgggtaataaatgatatggcaattttatttgaaattgggatgatttttattgatttgaggctttccctctaaagaagggtacatatgacaagtttttttcaacggtaaggatataaataacttttttttaatggtaagggtaaagttaaccagtaaatcaaagttgatgaagaagaaagattacaaataagaaaaataaataattgaaaatgcatatatttattgaaagagatattaaaaataaagttttagtaatagattttgatgttcactctccaaagagagtgaaatacactaactatgccagctaagcattcagggaggtaattatttcagttttaaatagtacagagggtaataggactcccgtgaagtttaattgtgtagttgaaaatccaaaaatacattgaggtgacattcaatcattttctaaatattaaaaatttaaagatccataaggggcttacaccctactcatggcttacgtcttgccttttactaagtaaattgtccaagagttgctcaagcatattagtggcctaaagcaaaaatcacttattaataatttttatataattgatttcttctagatttcaattgataataataccattgttattttaaattatttttcatgagatataatattccaaatatgtcaaatttcttttaataattccttcatttcatctaataattccttcatttcatgaaaagtttactttttatacaaataatattcaatattttttttaaaaaaatactccttataacctattattattaaatatgaaacccttaagttttggggtctaagacacatgtctttttttagcactgtcgagtcacctctaaaattgtctcgccttacgcgcgtgttcgttaaaacactgcgcagaatgattattataaaaggaagtgttatttgtagttttgatgatgtgacaaactcagagaccttgtaaaggtaccaggttctcaacatgagttttgatgatgtgatatactcaggaaccttgtaaaggtaccaggttcccaacatgaatagcctgttgactgccagccggagaaggtacagaatgggtgcacatttaccaatggcgtgagaaaagtcagaccttttcaacaaatggcaagagtttaaggaaagggacttgtctatacaatgtcactttcctaaacatcattccttagtttttgcaacttgaaaaagtactctcacgaacatttgcaaaggctatagaaaatccaagtgaagaattattcaaataacaactgaaaattcagaagcatatcgtgtagttgtttgagaatatattcttgtggtcttacattgtaaactgttcctaaatctataaaggaatcagtgtggtggtgttgaaattctaagttgtcttgaagggatagcttagtgggtagaataacttctacttatgcttatcaagcaaaagagttattgcttgatcgtgagattaaaaactttctctcacatttgtgtaactggttttacttttacttgcgaattttagtgaaacagttgtgaaaatcctgtgagacaggtcgtggttttactctcttaagcaaggaggtttccatgtaaaattattgtgttgtcaagctgcatttactttctgtttatactttgtgtgtcaagggacctggtccattgactgataagtagacgcataaattctaacagtaagatacttctcctttttctttaatacaagtaatgtaatttatctctaagaaaatataaaagttcaacaaatgaaagggcaagtatgaaaaaaataataatacaaacttacctcttcaattttaaacaatgattggtataaaaagatgctgccccacgttgtctctctctttcttttttatcgttcacatttttaggaaacttgggctacagcaaaagcaaaagtcattactatactcatttttttgtagctacttaaaaaagagaagaaaaaaatggctgaaattcttcttacatcagtaatcaatgaatctgtaaaaatagctggaaatctactgattcaagaaggaacacgtttattttggttgaaagaggacatcgattggctccagagagaaatgagacacattcgatcatatgtttgacaacgcaaaggcctaggaagttggaggtgattcaagggtcagaaacttattaaaagatattcaagaattggcaggtgatgtggaggacctcttagaacgtatagaactttaattacgtaatcaatttttgttgtttgattttatagatttagacaatatatatataattatttatcgttcaacaaagaagacgattgtgtattcgggttgttcatgaatttcaacttttactatttcattttgaattttttggttagtcatttctatcaatttgcttaggacacctgtgcggaattgttatactactccctttatttcatattacttgaatttgtgaggcaatgcctatatatattaagaaaaatattcaaggacataatttaaatcatgattctattattttcctttgtggaatcataaatataactttgtaagtagtttaatttatctcctaaagcgtacagaacttcaataaataaaaggacaaatatggaaagaatttcaaacatccttcttaaactttgaacaattcaattattatgaacaatgcaaaaacttcaaaaattcactttaatataaaataaaggtaatataatataacatgattttttttttaaaaaagaaaaacatatttgttacatatcactgttgggactcgtcctagggcaaaactctggcaaaacgcctcgagactgaactttgggtcttagttcggtaagaatcacgccctaaactgcagattgtacgtcctaagtacgcccaacacccaacgttcggggctcgactaacatatcttatacaaagtaattatgtgttaaaatctgtatagttaacatttttgaccctcatagttcttgaataaatgaatgatacttaataatttttaaatctgtagagataatagtaactcaaataattagttgtagtatcacatttttactattttataacaatgtaaagatgataatataatatgtaacatttctttcaaaacatatagcaaatttttactttttcttgcttattattgattttcttggttttgtcatttgtgtcaaaactatcctattttatttaactatttgaaaataattttattttgattcatgatatagtgatatttttattataataatattattgattattttcttttagggggtaaaaattttaacatcgatagggcgctcaaagcttacgccttgtacttaaagacgcccccttgacaagactgcagcgagtgattgtcatagaaaaaagaaatttctcctttttcattaatgtgcagctgccccacgttgtcactccccttcttctttatcatttccttcttgacattattaggagacttggccgtggactccatctaccactaaaaagctaaagccatcagtatactcattttttggtagctactgaaaaagagagaaaaaaaaatggctgaaattcttcttacatcagtaatcaataaatctgtagaaatagctggaaatttactgattcaagaaggaaagcgtttatattggttgaaagaggatatcgattggctccagagagaaatgagacacattcgatcttatgttgacaacgcaaaggccaaggaagctggaggtgattcaagggtcaaaaacttattgaaagatattcaagaattggcaggtgatgtggaggatctcttagatgacttccttccaaaaattcaacaatccaataagttcaattattgccttaagaggagttcttttgcagatgagtttgctatggagattgagaagataaagagaagggttgttgacattgaccgaataaggaaaacttacaacatcatagatacagataacaataatgatgattgtgttctgctggatcggagaagattattcctacatgctgatgaaacagagatcatcggtttggatgatgacttcaatatgctacaagccaaattacttaatcaagatttgcattatggagttgtttccatagttggcatgcccggtctggggaaaacaactcttgccaagaaactttataggctcattcgtgatcaatttgagtgttctggactggtctacgtttcacaacagccaagagcgagtgaaatcttacttgacattgccaaacaaattggactgacggaacagaaaatgaaggaaaatttggaggacaacctgcgatcactcttgaaaataaaaaggtatgttatcctcctagatgacatttgggatgtggaaatttgggatgatctgaaacttgtccttcctgaatgtgattcaaaagtcggcagtagaatgataatcacgtctcgaaatagtaatgtaggcagatacataggaggggaatcctccctccatgcattgcaacccctagaatccgagaaaagctttgaactctttaccaagaaaatctttaattttgatgataataatagttgggccaatgcttcacctgacttggtgaatattggtagaaatatagttgggagatgtggaggtataccgctagccatagtggtgactgcaggcatgttaagggcaagagaaagaacagaacatgcgtggaacagagtacttgagagtatgggccataaagttcaagatggatgtgctaaggtattggctctcagttacaatgatttacctattgcctcaaggccatgtttcttgtactttggcctttaccccgaggaccatgaaattcgtgcttttgatttgataaatatgtggattgctgagaagtttatagtagtaaatagtggtaataggcgagaggctgaggatttggcggaggacgtcctaaatgatttggtttctagaaacttgattcaacttgccaaaaggacatataatggaagaatttcaagttgtcgcatacatgacttgttacatagtttgtgtgtggacttggctaaggaaagtaacttctttcacaccgcgcatgatgcatttggtgatcccggcaatgttgctaggctccgaaggattacattctactctgacaatgtcatgattgagttcttccgttcaaatcctaagcttgagaagcttcgtgtacttttctgtttcgcaaaagacccttccatattttctcatatggcttattttgacttcaaattgttgcacacattggttgtagtcatgtctcaaagttttcaagcatatgtcactatcccaagcaaatttgggaacatgacttgcttacgctatctgagattggaggggaatatttgtggaaaactgccaaatagtattgtcaagctcacacgtctagagaccatagacattgatcgacgtagcctcattcaacctccttctggtgtttgggagtctaaacatttgagacatctttgttatagagattatggacaagcatgtaacagttgcttttctataagctcattttacccaaatatttactcattgcatcctaacaatctacaaaccttgatgtggatacctgataaattttttgaaccgaggttgttgcaccgattgatcaatttaagaaaactgggtatactgggagtgtccaattctaccgttaagatgttatcaatatttagccctgtgcttaaggcgctggaggttctgaagctcagtttttccagtgacccgagtgaacaaataaagttgtcatcgtatccacatattgctaagttgcatttgaatgttaacagaacaatggccttgaactctcaatcatttcctccaaatctcatcaagcttactctagcctactttagtgtagaccgttatatactggcagtacttaagacatttcccaaattaagaaaacttaaaatgttcatctgcaagtataatgaagaaaagatggatctctcgggcgaggcaaatggttatagctttccgcaacttgaagttttgcatattcatagcccgaatgggttgtctgaagtaacgtgcacggatgatgtcagtatgcccaaattgaaaaagctgttacttacaggattccattgccgaatcagtttatcggaacggcttaaaaagctgagtaaatgaacatctcaacaggtcagtttgctagtataactatttacgtacaggggtgcatcacagcaacgtgagtgtagtagtgttgtttcttgttgtggttgtttgttggttgttcagatctgaaagtgtgaagctcattagaacacgtctcatagtgatattaaatttacttttaaacaataaaggcgtgtaataagtcattgtaataattaaatcatgtaactgatttttcacgagagaaaatttatgtcattttcctttgtaaagataaagtagtcattggttccaattgtaagattaaatacttgaatacataatatcaggattttgaacacgataatcttacatagaaatcattaggggaacatacctgatgaggaagacatcttcacacacaaaaacgaaagtgttagtcgtaaattgatttctacctccttttcctaactttatgttaccacaatcgtcagcgatagaattattctagagaatatgtggttaactctagtgggtggagggaggaccaattcatagaggttgtgatttaatctgatacgtccatcaattaaccaatgtacggacgagatctattacttaataaatattatttatgatattacttggattacgactaaacttgggtcataagtaagaaataattaataataattcttacagtctcccacttggcccaataaccatatatcattaatatttaataaatattagttgcgcatacaatagatctcttctataatgtcaatcatgcataccacaatatgacaaactactaatgcgagttttgacggttgcacataaattttaagctacatacttccttccatatactactacattagcaacttatcatactaggttcataaggtataaaaacatataacattacggtccacaataatgcctcatataaactcatcttgtaatttctcaaaacaataatgtgtacaccattacgagaaacaagatgttcagaaacacataatttgagctc

SEQ ID NO: 256 - DNA, 3947 bp, Capsicum chacoense
  source 1..3947: mol_type = genomic DNA
tggtggtgcatttctgtcttcagctttgaatgttctctttgataggcttgctcctcatggtgatctgctcaacatgtttcagaagaataagaatgatgttcgactcttaaagaagctgaaaatgactttggtcggccttcaggttgtgttaagtgatgcagagaataagcaggcatcaaatcaacatgtgagccagtggcttaatgaacttcgaggtgctgtggacggtgctgaaaacttaatggaacaagtcaattatgaggctttgaggcttaaggtggaaggtcggcatcaaaatcttgcagaaacaaacaaccagcaagtaagtgacctcaaactgaacttgagtgatgattattttctcgacataaaggagaagttggaagaaaccattgaaacattggaggatttgcaaaagcaaatcggtgaccttggcttacagaagcatttagatttgggtaagaaactagaaactagaacaccttcaacttctttggtcgatgaatctaaaatccttggtagaatgattgaaaaagagagattgattgaccgtttattgtcaagtgattcaaatggagaaaatctgactgttgtccctattgttggaatggggggcgtgggcaagacaacacttgctaaaattgtttacaacgataagaaggtgaaagatcattttggcttgaaagcttggttttgtgtttcggaggcatatgatgctttcagaataacaaaaggattacttcaagaaattggatcattcgacttaaaggatgacaacaatcttaatcagctacaggtaaaattgaaggaaagcctaaagggaaaaagatttcttgttgtccttgatgacttgtggaatgatgactgtgatgagtgggatgacttgaaaaatctttttgtacaaggagctatgggaagtaagatccttgtgacgacacgtaaggaggatgttgccttgatgatgggtaatggggcaatcaatgtgaagactctgtctgatgaagtctcttgggatctattcaaacagcattcattaaaaaacagggatccggaggaacatccagaacttgaagaggttggaaagcaaattgcagacaagtgcaaaggattgcctttagctctaaaggcacttgctggtattttatgccgcaaatcagaggtgtacgagtggaaaaacgtcttaagaagtgaaatatgggagctgccaaggcgtaagaatggtatattaccagagttgatgatgagctacaatgatcttcctgcacatttgaagcgatgttttgctttttgtgcaatatatcccaaagattataaattttgcaaagagcaagttattcacctgtggattgctaatggtctggtacaacagttgcattctggtaaccaatactttaatgagttgagatcaagatcattgttcgaaagggtcccagagtcttctgaaagatacggagggaaattcttaatgcatgatcttgtcaatgatttggcccaaattgcatcttcaaaactttgtgtcaggttggaagagtgccaaggatctcatatattggaacaaagtcggcacacgtcgtattcaatggggagagatggtgactttgagaaattgaaaccgctctctaagtcagagcagctgaggacattgcttccaatctctatccagttcctttaccgccctaaactaagcaagagggtgctgcataacatattgccaagactaacttacttaagggcattatcattgtcatgttatgcgattgtggagcttccaaaagatttgtttatcaaatttaagctcctgagatttttggacctttctcggacagagattacaaaattgcccgattctatctgtgcgttgtataacttggagacacttctcctgtcatcttgtgatgatcttgaggagctaccgcttcagatggagaagttgatcaacttgcggcaccttgacatcagcaacacttctcgcttgaagatgccgctacatctgagcaagttgaaaagcctccaagtgctagtgggagccaagtttctactaggtggcccctgtggttggagaatggaagatttgggtgaagcacattacatgtatggatctctatcaattttagaattgcaaaatgtggttgatagaagggaagctcagaaggcgaagatgagggataagaagaagaatcatgttgagaagttatcgttggagtggagtggaagtgatgcggacaattcacaaaccgaaagagacatacttgatgagctacgtccacacacaaaaataaaagaagtcgaaatctccggatatagagggacacagtttccaaattggctagctgatgattcgtttcttaagctgctagtacaattgtctcttagcaactgcaaggactgtttttccttgccagcactaggacagcttccttgtttgaaattcctttccattagaaagatgcatcgaataacagaggtgatggaagaattctatggtagtccgtcctctgaaaagccttttaacactcttgagaagcttgaatttgcagagatgcctgagtggaagcagtggcacgtactagggaacggagagtttcctgcacttcgggacctttcaattgaagattgccccaagttggttggaaatttcctcgagaatctttgttctctgacgaaattgagaatctcaatatgtcctgaactcaatttggagacacccatccaactttcaagtctaaaatggtttgaagtttctggttcttttaaggctggatttatttttgatgaagctgaactgttcaccttaaatattttgaattgcaactctcttacctccttgcctactagcactctgccgagtacgttgaagacaatatggatatgtcgttgccggaaattgaaattggaggcaccagatagtagtaggatgatttctgacatgtttctggaggaattgagactggaggaatgtgattctgtatcatcaactgagttggtcccaagagcacgcactttgactgtgaagaggtgccaaaaccttactaggtttttgattcctaatgggactgaaagactcgatatttggggttgtgagaatcttgaaatattttcggtggcatgtgggacccagatgacgtttttgaatatccactcttgcgcaaagctgaagcggctgccagaatgtatgcaggaactccttccatctcttaaggaactgcatctgtggaattgtccagaaatagaatcctttcctgatggaggattgcccttcaatttacaactcctcgtgatcaactattgcgagaaactggtgaacagtcgaaaggagtggcgtctacagagactccattctctcagagagttgttcatccgccacgatggcagtgacgaagagattgttggtggtgagaattgggagttgcctttctctattcaaaggcttaccatagacaatctgaaaacattaagcagccaacttctcaaaagcctcacctctcttgaaactctagattttcgtaatttacctcaaattcggtcactgctagaacaagggcttccctcctctttttctaagctatatttatacagccatgatgagctccattcactacaaggtcttcagcacctcaattcggttcaaagtctattgatctggaattgccctaatctccaatctcttgcagaatcagcgttgccctcctccctctctaagttgaccatcagggattgccctaatctccaatcccttcccaaatcagcatttccctcctccctctctgagctgaccatcgagaattgccctaatctccaatcccttccagtaaaagggatgccctcttccctctctatactatctatttgcaaatgcccatttctcgaaccactcctagaatttgacaagggggagtactggccagaaattgctcatattcctgaaatatatatcggtcgcactatgt

SEQ ID NO: 257 - DNA, 18284 bp, Solanum tuberosum
  source 1..18284: mol_type = genomic DNA
tgcgcaattcttactgttttataccttttctccctctcttcctctccatcattttcagccttatggatattattgttatgttcctcatgagtatcaacatgcatattcttttctccaaattgttgttcatctcttacaatattattatcataaatttcaccaacattcgtatgatttcggccatttgcttctagaccttttatcgatttctccctttgtattttttctctcaatacaagttgccataagtatttcacaatttccttgttgaatggattttccaagcaaaaataagctccattttccaaagcgttcttggctaagagtctattgagtttatcacctacaactgcataattatattgagaagttaaaaattaaaattaaattatatcatacattatgagaatagttaatttcacacatatatttactgaattttatctgttatgacaacaactttgttatgaaacaatcatttatcatataactataactaaaaacaagattaacaatggatagatgtcgtctcttgacaatagattaacgataaattttatagctaattatatttttgtggtgtattaattgaaacaactgactttacccaatatttataacaagaagtgaaaaatagaattataaatacttaccaagagagattatatttaaggttacagcttgtgtcaagagttcaaaacaatgtaaatctgatgaattgacatcgattatcatcatgtcaatttttttcttttctttggagagcattgacattgccgcaggagtcgtaactgtcgtaactgtatatatccatacattttaaagttaaagttagtgaagaacatgaaaaaaatattatacacaaagttatcatttggatatgtttatttaatttctcattcaaattcaattatgaaatttcatattatgttgctatactttaatttatgaaataacacatattaatcaacttatatcgtaaacggtgtgtgtaatgacccgaaaggtcattttggtaatttttcgtggaaatgactattttgccctttcggtagttgccccgagtcccatgttttatggttgtaaagttagtttgaggaaaagttggtaaaaagttgagtttttgagaagttgagtttttatgagttaaagttggttaaaaagtgctttttcgagttatttggagtttcgggactcggattgaatttccgtcgattccggcaattttagaatgtcgaaacgggtctgtgtgaagttacggagttgaatttggagttgaaacgaagaattgaggtcctaagttgctaaagttgtgaaattgtgataaagagttgactttggtcaacatatgaggttccgaggctcggattgaaattccgaaagtaccgttggtttcgggaggcgattctaagtctagaatgagtcttggttgaatttttagacgctctgtttgagtttcgaattttttttgcgttaaactagtttcttggcatcttattgaatttcgggtcaaggagtcctcgaattcaaattccgacggttccattgagtccggaacgtcgaatttagtgggggtacatatttagtttgtgtgcacgagattccgaacgaatcccgagggtccaacggggacttaaactttggtgttattgttgtgtttcagctgcaatagcagtcctttttaagtcaaaaaacagtagccattttcccccaacttgaaaaatatccatttctacatttttagactttgagagctcgaaaataggtgatttcaagtgggttttcacaaggaattcattgggtaagttatttccaacttatatctttgatttccatcgattatttatggattttaacatcaaaatttgagatcccaactgaaaaatttgggggtttttgcctagtccgaatttaatagaaaatttgagtttgtgaactcatttcaactcctttttcgaaacggttttcactattggattctaaatttcttggggaacatttttcactaaaaatttccagatttcgagaatattttttcggaacgagttttttttgaccattttacccttttctccaaatttcacgatattggtgttgttagattcgtattgattgtgagattccatttatgaatagattgtggtgatttggagcgtgctcgaaagggtaaaactcaaatttgagttactagttgaagtgttttgaggcaagtgacttctaaactttgttaaactcttagactacacatgactactttcctaattgtgttggggagtaatggggattgaggatgggttttatttgttgattgaaattgttgtaaatgaaagatggggaataaaacgagctaagtgtgttatatgtgacttgaatttgttgaataagtcatgtgataaccgatattgaggggatagaagagcatgagtaagctatgattgatacagacattgatgttgagacagatgatgtgtaatactatgatatggttgtgattgagacagacgatgtgtaatactatgatgtggtcgcgatatggttgtgattgagacagataatctgtaatactatgatgtgatcgtgatatgattgtgattgatgacatgtgcatattcattattcatctcatgtgtgaactatctgttgcatgagttctgagacactgatatgaggatggatggctatgagacacagttgagactagctccggctagagatatatgagatggactagctccggctagcgatttggatgccgatgggatctggttccggcggtgatacatggtccatgtgtggcccccatgggttctgatttgagtattcagcgcggactgattacgtcaacagatatgtatcgtaggacagacatgcatcatgactatatgacattattattgcatttgcatcgcatttgacttcatctttgtctgtggtgtgtggagtttacctatttgcccctcttcatgtgatatatgatctatttgctcttacatgaggatatgaggttgatgttgagacactgttggatatatctgttgattatgaattgtgtagtataggttgttggttcgctgttagaatgaagtctcggtggttcggttgggattgaaaggagttgtttgtagctgctagtttagcttagtttagtgttacttgcgagtacctgttgcttttggtactcacccttgcttctacacagtggtgtaggttgacagctctatcagattcgacttattactcatcttcaaattagagcttccagacttacttgagaggtagcggttcattccagacgtgccctcaagttatctatatttattgttttgttctattatagaactttactatgagacttgtatattttattcagattccgtactagaggtttgtacatgtgacaaccaattctggggtttcattgagtttatttaaagacttccgcttatctttctatcttattcttgttttattaattccgtatcgtcgggtttttgggtgttaggcatcacatccggttttggagtgtgacagtgtgtgcaatcttactaatatataatattactttagagtaactaactgtaggaatatataatagagaagattctataggaataattctaaagaatacattctaatttattctttgacttgttgaaaacaaataaacactgaatatatattagattaaatactattaaagcaagatataataggataaaaagttttaagataaatttatgtaaaaagttttaaggttattttatttcataaataagtaacgagagtttaggagatttaacaaattattagaaaggagttaccaaaattatgttgaaaaggtttaacatagcttgattaaggaacaatcgatattaaatactaacaaagtaattgaaaatgaaacaaaaataaatgaggaaaaaatcacatgaaaagatttttcttttcttgtctacatctaataaaagacaaaaaagaaattgaagaaaaaaatcatgaaaatcatatgtccctatttatttgtttgtctacatcgaataaaagacaaaaaagtcatctcagataataatgatagtcagatcatctcttatcatgtctttatctcgctcctctctgttgggttctaaagggtgattagggcttgcaaataatatgattgataaattagttgacaaaaacttatactaaaaactaatattattatatgaaaactaatataaagaaaaatattaaaactgttgagagattaaatctccccataaacaaaactcactaaacgactacattgtggattctattatgttgtgctatgagaatagggatcttcaatttatagatctccaaatttttcctctaaggaaagaataaaccaaatatggaagaaaattatatttttcttttagaaaaagttcaagcatttatggtaatactttgacttttctttaaagaaaaaataaacttcaaataagataagaaaatcagggcaaaaccctaacactctcttcgatcccttactcttattttgtgcctcaatcatccaagtgaatttgttttctttctaaaacgatatatagatttgcaaaaatcaaagatctgtaatttcaaaatcatttatgagggacctaattattttctcctccaacacgatgtcactctaggccgattgacaaagaataagtttcctttttattttttgtacaaaaaagtcaagtgtgaaataattaatataaacttaaactacctcctttatggaaaaatatccgataaaattagaacaacacatactttaacataaaattattgaacctcttaaaaattacacaatcgttatggagaaagctaatcgagtatgtgacatggttataacaaaaacaaaaatggagaatctaatttaattccttataatcatacaaaattcatttattaacttgtaaaacaacatacacaagcatagaaataatgttatgataacaaggaaaggaaaagttctcaataaacatcatatcaattaattctctctatatataatgaaagtcagacagaaattagttctagatatatcacctttgtatccattgaactctagtaaatcaaccattggattagaaaccaattcctcatcttgatataccagcaacacagaaacctcttcagtcaaatcataaaaaggttctgtcattagattaatttgaatttgtaagaaaaacacttacaactgaagctatttataaagtatcatttactggcttatgagcctgtttagagataattatatataaataattttatctaaatatctagataatccctcaaatttgacacaaattgtaatttagatacttgaatttatctaaaagagaccaaataaatacttttactattgtcatatacgcactcatgaacaccttatgctgacatggcaaatttatgtgtattgtaaatgcttgtgttattacattattgaatcacaataaaaagattatttcttaaaaaaattaaatttttgattgacttttattccaacaatcaaattatacaacttggggttcattaactatttctattaatatcaaaatttaacattgattattggatattatttgaagttattgaagatgacattatatttattaagtattaattacacttcttgaatagttggaagattctttgatttgtgtccataattcaatagttcaaatggtgaatgtcttgtcttcaagtaacggctaatggtcttagaattaggccttatttatttttgttcggataaattagcccagagatattctaaatagagtatgatattgtgcactttgaccaagttagcataattttttttttttcaaaaagtctcacacattatggaaaaattacgcgagttggcaaatactactaggttattagtcattgagggtagggtatagtttaatttatttactgtcagtaaatacagtttcagtttttttgccattaataatgagacccaccacctctttgtatacctgtcacaccccaaaatcggatgtgatggcacgtgcccaaaccccaccggacacgtcagcctaacacccaaaaacccgacgatacgaaattaataaaacaagaataagatagaaagataagcggaagtctttaaataaactcaacataaccccagaattggttgtcacatgtacaaacctctaatacggaatctgaataaaatatacgagtctcatagtaaagttctagaatagaacagaacaataaatatagataacttgagggcacgtctggaatgaaccgctacctctcaagtaagtctggaagctctaatctgaagatgggtaataagccggatatgacagagctgtcaacctacaccactgtgtagaagcaagggtgagtaccaaaagcaacaggtactcgcaagtaacactaaactaagctaaactagcagctacaaacaactcctttcaatcccaaccgaaccaccgaaacttcattctaacagcgaaccaacaaccaatactacacaattcataatcaacagatatatccaacagtgtctcaacatcaacctcatatcctcatgtaagagcaaatagatcatatatcacatgaagaggggcaaataggtaaagtccacacaccacagacaaagatgaagtcaaatgcgatgcaaatgcaataatgatgtcatgtagtcgtgatgcatgtctgtcctaagatacacatctgttgacgtaatcagaccgcgctgaatactcaaatcagaacccatgggggccacacatggaccatgtatcaccgccagaaccagatcccatcggcatccaaatcgctagccggagctagtccatctcatatatctctagccggagctagtctcaactgtgtctcatatccatccatcctcatatcagtgtctcagaactcatgcaacagatagttcacacatgggatgaataatgaatatgcacgtcatcaatcacaatcatatcacgatcacatcatagtattacacattatctgtctcaatcacaaccatatcacgaccacatcatagtattacacatcatctgtctcaatcacaaccatatcacgaccacatcatagtattacacatcatctgtatcaacatcaatgtctgtatcaatcatagcctactcatgctcttctatcccctcaatatcagttatcacatgacttattcaacaaattcaagtcacatataacacatttagctcgttttattccccatctttcaattacaacaatttcaatcaacaaataaaactcatcctcaatccccattactccccaacacaattaggaaagtagtcatatgtagtctaagaatttaacaaagtttagaagtcacttgcctcaaaacacttcaactagtaactcaaatctgagttttactcttccgagcacgctccaaatcaccacaatctattcataaatggaatcccacaatcaatacgaatctaacaacaccaatatcgtgaaatttggagaaaagggtaaaatggtcaaaaaaaatctcgttccgaaaaatattttcgaaatctggaaatttttagtgaaaaatgttccccaagaaatttagaatccaatagtgaaaaccgtttcgaaaaaggagttgaaatgagttcacaaactcaaattttctattaaattcggattaggcaaaaaaccccaaattttacagttgagatctcaaattttgatgttaaaatccataaataatcgatggaaatcaaagatctaagttggaaataacttacccaatgaattccttgcgaaaatccacttgaaatcacctattttcgagctctcaaagtctaaaaatggagaaatgggtatttttcaagttggggaaaatggctactgttttttttgacttaaaagggctgctattgcagctgaaacacaaccataacaccaaagtttaagtccccgttggaccctcgggattcgttcgaaatctcgtgcacacaaactaaatatgtacccccactaaattcgacgttccggactcaatggaaccgtcggaatttaaattcgaggactccttgacccgaaattcaataagatgccaagaaactagtttaacgccaaaaaaattcgaaactcaatcggagcgtctaaaaattcaaccaagactcattctagacttagaatcgccccccgaaaccaacggtactcttggaatttcaatctgagcctcggaaccttatatgttgaccaaagtcaactctttatcaaaatttcacaactttagcaacttaggacctcaattcttcgtttcaactccaaattcaactccgtaacttcacacagacccgttttgacattctaaaactgccggaatcgacggaattccgatccgagtcccgaaactccaaataactcgaaaaagcactttttaaccaactttaactcataaaaactaaacttctcaaaaactcaactttttaccaacttttcctcaaactaactttacaaccacaaaacatgggactcgaggtaactaccgaaagggcaaaatagtcacttccacgaaaaattaccaaaatgacctttcgggtcattacaataccgaatcaacaaagccttcatcggcctttatttatgattttatacaaaatcaaatttatctctcatctcctctcctctcctcatttcctatttttctcctaaaataactctttcacttccaatttgaaattcgaatttcactttctccctccagtcgtgttttactttttgcaggtaaccgcctaaatcataggtgaacctcttttttttttttttttcatttttcaattgtatatgtattgtgcttgttagtgtttggataattttttctcaaaattccctcattacttattagataatcatttttatagaaaataaaatggatgattcgactagaggattatgagaggtacgtcattgcatgtcaaagtttttaataatcaaccttcattttcactctgtttaactcaagattttggagtcaatgcagggtctatggaaaaatctaaacaaattctagagtaaaaatctattgaagaattgagatccaagaaaaaaatgacccaattgcacttccagaagtcatcaacaatgtcaaggcaagcgacattaaaattgttgaaggagaaagtaagaggaaagccaaagatagtgattctgaggaggttgtgtctccttcattagatcaagacaaatacgaagaacatcaggtatttgcttaaaacacaattgtatgtagatatttgtatattttgttagtgatatacaaaattgtatgtagtatatgtatattttctgcttacatcacaattgtatatagatatttgtatattttgttagttatatacaaaattgcttgaagtatatgtatattttttgcttaaatcataattgtatatatatatttgtatatcttgtaagttatatacaatagtatgaattaaacaatatacaaaccttacattattatatatacagttaggttacaccaaaaattatcaaattaaagcacaacttttttatcgaatcatatacaattcatatatataattgacttagtaattttatacaactacttacacttatacatggtataagaattttgcacaattacttacatatatacaatattatcaattaaacaatatacaaatcgtataacttatatatacagtaaaattacaacaacaacaacaaaaattatcaaattaaagcacaccgttgttgtcgaatcatatacacttcatatataaaaattgtgtcattcaatttttcgaacaaaaaattagaattgaattggtaataaaaaatttatctaatcttgtataaacaaaattaaattattgcaaaccattagaatgaaaaaaacaaaaataatccgttttccaaaatttcaattatatactatacaaatcaattgtatactttcttgctgttcaaaacatgaagtttccttgaaagaaacgcttacctagcgttgaatatacaagaatattgattaatcttatgcttcagtcgtttgaggaacccagttgttatggtgtttctattgctatagaactcctttttggaaaaatatttgattttggacgattagcttgaacattgggactatataaattttttattaccgtatttagcactcatgtatccatttattaaaaaaaaatgtataaattatatttttaaaagaaaatatacaaaattaatgcttcatagcaaactaaactatgcccattgaatgtaattactaaactatacctatagagcgttatttcattaaatacgtttatcatatatgaaattttcccttaagagatcctacaccttatatatagcttctcaaatgtggaaattcaatctcacacccaacaatctttccctcagactaagtttcatggcccaatatcacaatgatccacgagtcaattcatgagattcactatgtgcatcacccacatcgtctaagtattttatggcaatcaagccctacaactagcttcttctttatatatatatgtgtgtgtatatgtgcgcgcgcgcgcatctctaattaatctcgtaaagggattaaggggccaatttcaaagaattaggcgattttcttagtttttcgtgtgtgttaacccataaatattttggtgatatggttttcggacgatttcttttgtgcaacttatatggaacccttcgtagggagttagtctcacactttttagagtccattttgggcactcaggggctaatttataggaaataggtgatcttctcagtccgtctgtattagcccatgaatattttggtgatatgtcttccgaataatttctttgtaaaatctttacgggaccctccatagggagttaatggagcagtacgtatagtctcacaattttagagttcattttgggcatttaggggccaatttacaggaattaggtgactttctcagtgttttgtgtgtgttagcccattaatatttggtgatatgactttcagacgatttctttgctacacatttacgaaaccctctgtagggagtcgggggagcagtacgtacaatctcacaattttagagtccattttagacatttaggggccaatttaaagaaattggacaattttctcagtttttcgtgtctgttagccattaatatattggtgaatatgacctacggatgatttctaatagaaatctttacgaaaccttcaatagggagttgggggagcaatacgtaccgtctgacaatttttagagtccattttgggcatttaagggccaatttacaggaattagacaattttctcagtatttttccatgtgttagcccataaatattttgttgctttgacttttagagtctaaacttctcatgtatattaagagatatttatgcttggttaattgaatcgaactaggaatagagaaattcctacttggatcttaatatttctctctctttgatttggaaaattctacgaagttgctttcaatggaattaaaatcataaatctattgtatgtaagaaacatacttatattcatgaatagatatgtgtagggtctaataatgaattatcacaattttttctactttttcctgtcagagtcctgctttttctttttctttttcttttttaactttggtctctgcttttgtctacatgatgataaggttggtggacctagctggaaatgtgatggaaatagctagtaaaagaaagaactttgcattttctgttttcttaaaaactgaaaaattacataacttgtggcaatttgttcattttcatactgagagatatttctattttttggatatatggcttatgctgctgttacttcccttatgagaaccatacatcaatcaatggaacttactggatgtgatttgcaaccgttttatgaaaagctcaaatctttgagagctattctggagaaatcctgcaatataatgggcgatcatgaggggttaacaatcttggaagttgaaatcgtagaggtagcatacacaacagaagatatggttgactcggaatcaagaaatgtttttttagcacagaatttggaggaaagaagcagggctatgtgggagatttttttcgtcctggaacaagcactagaatgcattgattccaccgtgaaacagtggatggcaacatcggacagcatgaaagatctaaaaccacaaactagctcgcttgtcagtttacctgaacatgatgttgagcagcccgagaatataatggttggccgtgaaaatgaatttgagatgatgctggatcaacttgctagaggaggaagggaactagaagttgtctcaatcgtagggatgggaggcatcgggaaaacaactttggctacaaaactctatagtgatccgtgcattatgtctcgatttgatattcgtgcaaaagcaactgtttcacaagagtattgtgtgagaaatgtactcctaggccttctttctttgacaagtgatgaacctgatgatcagctagcggaccgactgcaaaagcatctgaaaggcaggagatacttggtagtcattgatgacatatggactacagaagcttgggatgatataaaactatgtttcccagactgttataatggaagcagaatactcctgactactcggaatgtggaagtggctgaatatgctagttcaggtaagcctcctcatcacatgcgcctcatgaattttgacgaaagttggaatttactacacaaaaagatctttgaaaaagaaggttcttattctcctgaatttgaaaatattgggaaacaaattgcattaaaatgtggaggattacctctagcaattactgtgattgctggacttctctccaaaatgggtcaaagattagatgagtggcaaagaattggggaaaatgtaagttcggtcgttagcacagatcctgaagcacaatgcatgagagtgttggctttgagttaccatcacttgccttctcacctaaaaccgtgttttctgtattttgcaattttcacagaggatgaacagatttctgtaaatgaacttgttgagttatggcctgtagagggatttttgaatgaagaagagggaaaaagcatagaagaggtggcaacaacatgtataaacgaacttatagatagaagcttaattttcatccacaattttagttttcgtggaacaatagaaagttgtggaatgcatgatgtgacccgtgaactctgtttgagggaagctcgaaacatgaattttgtgaatgttatcagaggaaagagtgatcaaaattcatgtgcacaatccatgcagcgttcctttaagagtcgaagtcggatcagaatccataaggtggaagaattggcttggtgtcgtaacagtgaggctcattctattatcatgttgggtggattcgaatgcgtcacactggaattgtctttcaagctagtaagagtactagatcttggtttgaatacatggccaatttttcccagtggagtactttctctaattcatttgagatacctatctttgcgttttaatccttgcttacagcagtatcaaggatcgaaagaagctgttccctcatcaataatagacattcctctatcgatatcaagcctatgctatctgcaaacttttaaacttaaccttccatttcccagttattatcctttcatattaccatcggaaattttgacgatgccacaattgaggacgctgtgtatgggctggaattacttgcggagtcatgagcctacagagaacagattggttttgaaaaatttgcaatgcctcaatcaattgaaccctcggtattgtacagggtctttttttagactatttcccaatttaaagaagttgcaagtatttggcgtcccagaagactttcgcaatagccaggacctgtatgattttcgctacttatatcagctcgaagaattgacatttcgtttatattatccatatgctgcttgctttctaaaaaacactgcaccttcaggttctacgcaagatcctctgaggtttcagacggaaatattgcacaaagagattgatttcgggggaactgcacctccaactttactcttacctcctccggatgcttttccacaaaaccttaagagtttaacttttaggggagaattctctgtggcatggaaggatttgagcattgttggtaaattacccaaactcgaggtccttatactatcatggaatgccttcataggcaaggagtgggaagtagttgaggaagggtttcctcacttgaagttcttgtttctggatgatgtatacattcgatactggagagctagtagtgatcactttccgtaccttgaacgagttattcttagagattgccgtaatttggattcaatccctcgagattttgcagatataaccacactagctcttattgatatagattactgtcaacaatctgttgtgaattccgccaagcaaattcaacaggacattcaagacaactatggaagctctatcgaggtccatactcgtcatcttttgtaagacatcttcttccttgctttacaacaataattaactcatcatcatagtaaactcgataataatctggataatagccttagtaagtcaaattgcaccaattcaacaaaagttcttgatgctgtcattgtgtttgatttgaatccttccaatattgtgtaacttgttatacttgcatgttcattcttgattttgggaagtgtaacatttcatttttcatcttttgtggctagcattcccaagagtgtgacaacagttgaagatgatgatgatagtgtgacaacagatgaagatgatgatgatgatgactttgagaaagaagttgcttcttgccgcaataatgtgtaagttcttatacctgcatgctcattcttgctataatgttctcttgttccttaattatgggacatctgacatattattttccatgttttgcgtcttttatttttctgcagcgagtagttaaggtgttctgaggactagccagttctctgaaataaatgtcaaatcagaagccaaatgtgtgagtgtttgttttgttcgttttcattttttctgcataaggtggcaggatgattgcaaatggcttgtaatttaattgtatatgatctttcgtatagccatttgtcagtggttcttaagatactccaaattttatgcacatacatacatactgtacaggccagaacagactccagtaacgtgtgtttcctttcttgggagtcctcaatctacctcgcaaaggctaaatccagtggcaccagctttattactaaaacattcacacgggaacagttgagaaaaactaggcctccataccaaacacacccttaaacttgagctggttgatagagactagagagtagagagcactacatggattatggacctagctaaaagaaagaccttttgtttgaagataagcttaagaaattcgcacactctctgtcaccttgacacaagtgttctcctcgaccccaactaataatgtatgatcacaaatttcctgtcttttttttaaactttggtctcttcttttgtctacatgatgataaggttagtgacctcgcatctttctactttatcctgttagtggacctagctggaaatgtgatggaaatagttagtaaaagtaagatctttgcattttctgttttcttaaaaactgaaatattacataacttgtggcaattaatttgtccattttcatactgagagtgagagagtcctattttttggatttatggcttatgctgctgttacttcccttatgagaaccatacaccaatcaatggaaattattcaatgtgatttgcaaccgttttatgaaatatgttttttgacttacaaacattgaattaaaatcttttgaacttttataaattaagatttttttcttttaaagaaatcgatactgtaatcctctatatcaacgagcttactcatgtgaaggtcaagtgataaaaccaggggccagagccagtctagacctagggggttcggagcttttgtaattggatcattgtgattacgggttgaatgtctaattttctaggcgattatgatagtattttgtatctgaataatagctcactttttctaagtaatggaaaagaaggtcaaaacgtgccactaaaagacttgactaagacaaaaatgggttgtcaagaacgtagaggagggtaggatggacagttggtcagatctagtatggataatacatggaggtagttggagtggcggctctcccaaaattctgtcatcttagatctttggattcggtcttatacatatgtgaggaaggtaatgaaaaatattggggtagaggattacaacatggggaatcaagatttcagatggtcagtcaactaactgagctactaagatttcaaaaaaaagaaaaagaagggttccatgtgacatgaaagtctcatattgcatagtttttgaatgaggcaaagaagtgaggaatcagatgaaccaccttcgatggaaaattatactatttatacatatagttaaaattgttttctatctttatattattgtagtcagctaatttgcatgtttacttattcatattttgaatagacataatacataaatacatcctttaacttggcttcaaatcaaatttatgcccttcaactttggatgtgcacaaatagacatttaaatttgtataaagttgaagaaatagacacacatgtcctacatgacatcctacatgtcattttttatcctacgtggtgtcttacgtgtattgtgtcatgtaggactcgtgtggctagtcgctcaactttatacaaatttaagtgcatacttgtgcatacccaaagtcggagaacataaacgtcaaatgaggtcaagttaaagggcacatttatgtattatgccttcttgatttcattaataatgaaaatcctgaatcatattcagattccgtcactaatcgttgaattaatatactatgtattatttattggatttttttgctatcttatttttaattgttcaaagttttgtttattatctttagcataatatctgattatattattttgatatactttttctagccctaattacttgtccatttttgaattgacacacctattaagaaaacaattattgaaatagtgagtttactattttacccatattaattatgaagtgggtgatttaaaaactcaagattttcaaaaagttctacttttttcaaagtaataaattaagggtataatatgtaaaaaaaattattctttcttgatttgtcaaaatagaaaagtaattaggaataactaaaaaaatggataaataattaaaaacggagggagcaatatgttatctttagcctaataatatctgattaatggccaccctaattgattggataggagaggatagacttgcttccaagtaagccaaaatataaaaagttgacaaaagggtgctaaattcgagacacatgtagtacttatataattcatgtgcggactcgttcttttgtagtactccttccgttctattttatatgtcatatttttattttatactttcattaagaaatgatgtaattttatctttctattcttatttaatgtttttttaagtcaattttataataaatgatgaatatattttcaagattaattaactactctatcaagggtataataggtaaaatatggtaatttatacataaattttataaaatgacaagtattgtggtccaactatttatagaaagagatgacatataaaatgggacggagggagttataaagttgacttaagaaaacatttaataagggtagaagggtaaagttacattatttcttaatgtaaatgtaaagtaaaaatgtaacatataaaatgggaaggagggagtagtattttctcgttttattttacgtggcactctattctcataatctatctttaaaaatgtcattttattgtaattgaaaataatttaacttaaaattctccatctacccttaattaatgaaatgatttacaattatataaatatataaaaattgttttagcttataattttctaaaatctttttttctcttatacatcgtattaagtcaaacaatactaagtcaaatggaatggcggagtatttcttttattttttttcacaccgtccatatgttttctcccatcccccagacccccactatgtatattcactccttagttgaatctgaatttagagtttagaagctt

SEQ ID NO: 258 - DNA, 396 bp, Arabidopsis thaliana
  source 1..396: mol_type = genomic DNA
atgtctacaccatcaggttcaaatccgttaccaatggccgacaagttagaagcaaaaggtcgtatagcatccatcaagttcgactatgtcaagaatggtcaacctaaagctggatcaacccatggtgtctcatatcacaatttcaccgagtggtttgatcttaaccatacatgcgatgagcatatcttatctgtgaagtgttactacgatgatggtgagatacaaggacttgtgatcaaaaccaatatcaggacgtctgcatatatgggatataacattggtactacgtttacacttgaagtcaaaggcaagaagatcgttgggtttcatggatcttttgataaaaaccttacctcgcttggagcttatttcgcaccgctttctcctgctaagtaa

SEQ ID NO: 259 - DNA, 978 bp, Pepper mild mottle virus
  source 1..978: mol_type = genomic DNA
cacaaacacgtttttattccggctgtgtagtctttcaacgttgtcttccgatgcccgtgtttccaaacttcagccaagaaatcgtctaagcctaaccttttccaaatctcatactcgactgcacaatgaaattcgttctgtgatttgtcatacttggaaatgtctagctctaatatgtccataggaacattagagtccagatctgagaaaaattcttcgatctgtgtaggcgttttccttgtataaaacatgaatcttgaactgtcaattgtctctagcagctgtcttgttaattctgaaaatacaggaccaaaaagcgcattgattttcttgctatgatacacaatagtttgcaaagccgggtattcagtttgaatactaagatccaaacgctgtttcggctgctgcttgatcatgtgcctgtattgatcaacggctggtaaatcaataaagtcaaaatcagccaactggccaattgttgacttctcttgcttttcgatccatctttccaaactcgcccttgaaagcagaggtatattttttggttttttcttttctttaattaagtatgcatcaaaaaacttatctactactagagaagcggtgtcttcgatgtcaacaacccctactaattcgggagagttgaaatttcttttgatcatcgcgaccaaattttccaacaatccaggttttcgaggtttttcagcagcagtcctgatcacaggtttcaatgtcgtctcagattctctcggaagaggcaccgatttcgacatatccaacacacaatccttgacattcaaactattctctcgtatttgcatagttacagcatcatactcattgagtatagtactgtttcccggcaaacacttgtcgtaataatattgcatgtcagaaacatctcctgtttttggtgctgcgacgaaaaggttaacacctttgtacaccgattctatctgtaattgctattgagtcgac

SEQ ID NO: 260 - DNA, 2370 bp, Bacillus thuringiensis
  source 1..2370: mol_type = genomic DNA
atgaacatgaataatactaaattaagcgcaagggccctaccgagtcttattgattattttaatggcatttatggatttgccactggtatcaaagacattatgaatatgatttttaaaacggatacaggtggtaatctaaccttagacgaaatcctaaagaatcagcagttactaaatgagatttctggtaaattggatggggtaaatgggagcttaaatgatcttatcgcacagggaaacttaaatacagaattatctaaggaaatcctaaaaattgcaaatgaacagaatcaagtcttaaatgatgttaataacaaactcgatgcgataaatacgatgcttcatatatatctacctaaaattacatctatgttaagtgatgtaatgaagcaaaattatgcgctaagtctgcaaatagaatacttaagtaagcaattgcaagaaatttctgataaattagatattattaacgtaaatgttcttattaactctacacttactgaaattacacctgcatatcaacggattaaatatgtgaatgaaaaatttgaagaattaacttttgctacagaaaccactttaaaagtaaaaaaggatagctcgcctgctgatattcttgatgagttaactgaattaactgaactagcgaaaagtgttacaaaaaatgacgttgatggttttgaattttaccttaatacattccacgatgtaatggtaggaaataatttactcgggcgttcagctttaaaaactgcttcagaattaattgctaaagaaaatgtgaaaacaagtggcagtgaagtaggaaatgtttataatttcttaattgtattaacagctctacaagcaaaagcttttcttactttaacaacatgccgaaaattattaggcttagcagatattgattatacttctattatgaatgaacatttaaataaggaaaaagaggaatttagagtaaacatccttcctacactttctaatactttttctaatcctaattatgcaaaagttaaaggaagtgatgaagatgcaaagatgattgtggaagctaaaccaggacatgcattggttgggtttgaaatgagcaatgattcaatcacagtattaaaagtatatgaggctaagctaaaacaaaattatcaagttgataaggattccttatcggaggttatttatggtgatatggataaattattgtgtccagatcaatctgaacaaatttattatacaaataatatagtatttccaaatgaatatgtaattactaaaattgattttactaagaaaatgaagactttaagatatgaggtaacagctaattcttatgattcttctacaggagaaattgacttaaataagaagaaagtagaatcaagtgaagcggagtataggacgttaagtgctaaagatgatggagtgtatatgccgttaggtgtcatcagtgaaacatttttgactccgattaatgggtttggcctccaagctgatgaaaattcaagattaattactttaacatgtaaatcatatttaagagaactactgttagcaacagacttaagcaataaagaaactaaattgatcgtcccgccaagtggttttattagtaatattgtagaaaatgggaacttagagggagaaaacttagagccgtggatagcaaataataagaatgcgtatgtagatcatacaggcggagtgaatggtactagagctttatatgttcataaggacggaggattttcacaatctattggagataagttaaaaccgaaaactgagtatgtaatccaatatactgttaaaggaaaaccttctattcatttaaaaaatgaaaatactggatatattcattatgaagatacaaataacaatttagaagattatcaaactattactaaacgttttactacaggaactgatttaaagggagtgtatttaattttaaaaagtcaaaatggagatgaagcctggggagataactttacaattttggaaattagtccttctgaaaagttattaagtccagaattaatcaatgtaaataattggattcgcacgggatcaactcatattagcggttatacactcactctctatcagggaggaggaggaaatctaaaacaaaaccttcaattagacagtttttcaacttatagagtgaatttttctgtgaccggagatgctaatgtaaggattagaaattctagggaagtgttatttgaaaaacgatatatgagcggtgctaaagatgtttctgaaattttcactacaaaattggggaaagataacttttatatagagctttctcaagggaataatttatatggtggtcctcttgtacatttttacgatgtctctattaagtaa

SEQ ID NO: 261 - DNA, 2370 bp, Bacillus cereus
  source 1..2370: mol_type = genomic DNA
atgaacaagaataatactaaattaaacgcaagggccctaccgagttttattgattattttaatggcatttatggatttgccactggtatcaaagacattatgaatatgatttttaaaacggatacaggtggtaatctaaccttagatgaaatcctaaagaatcagcagttactaaatgagatttctggtaaattggatggggtaaatgggagcttaaatgatcttatcgcacagggaaacttaaatacagaattatctaaggaaatcttaaaaattgcaaatgaacagaatcaagtcttaaatgatgttaataacaaactcgatgcgataaatacgatgcttcatatatatctacctaaaattacatctatgttaagtgatgtaatgaagcaaaattatgcgctaagtctgcaaatagaatacttaagtaaacaattgcaagaaatttctgataaattagatattattaacgtaaatgttcttattaactctacacttactgaaattacacctgcatatcaacggattaaatatgtgaatgaaaaatttgaagaattaacttttgctacagaaaccactttaaaagtaaaaaaggatagctcgcctgctgatattcttgatgagttaactgaattaactgaactagcgaaaagtgttacaaaaaatgacgttgatggttttgaattttaccttaatacattccacgatgtaatggtaggaaataatttattcgggcgttcagctttaaaaactgcttcagaattaattgctaaagaaaatgtgaaaacaagtggcagtgaagtaggaaatgtttataatttcttaattgtattaacagctctacaagcaaaagcttttcttactttaacaacatgccgaaaattattaggcttagcagatattgattatacttctattatgaatgaacatttaaataaggaaaaagaggaatttagagtaaacatccttcctacactttctaatactttttctaatcctaattatgcaaaagttaaaggaagtgatgaagatgcaaagatgattgtggaagctaaaccaggatatgcattggttggttttgaaatgagcaatgattcaatcacagtattaaaagtatatgaggctaagctaaaacaaaattatcaagttgataaggattccttatcggaggttatttatggtgatacggataaattattgtgtccagatcaatctgaacaaatatattatacaaataacatagtatttccaaatgaatatgtaattactaaaattgatttcactaaaaaaatgaaaactttaagatatgaggtaacagcgaatttttatgattcttctacaggagaaattgacttaaataagaaaaaagtagaatcaagtgaagcggagtatagaacgttaagtgctaatgatgatggagtgtatatgccattaggtgtcatcagtgaaacatttttgactccgataaatgggtttggcctccaagctgatggaaattcaagattaattactttaacatgtaaatcatatttaagagaactactgctagcaacagacttaagcaataaagaaactaaattgatcgtcccgccaagtggttttattagcaatattgtagagaacgggtccatagaagaggacaatttagagccgtggaaagcaaataataagaatgcgtatgtagatcatacaggcggagtgaatggaactaaagctttatatgttcataaggacggaggattttcacaatttattggagataagttaaaaccgaaaactgagtatgtaatccaatatactgttaaaggaaaaccttctattcatttaaaagatgaaaatactggatatattcattatgaagatacaaataataatttaaaagattatcaaactattactaaacgttttactacaggaactgatttaaagggagtgtatttaattttaaaaagtcaaaatggagatgaagcttggggagataactttattattttggaaattagtccttctgaaaagttattaagtccagaattaattaatacaaataattggacgagtacgggatcaactcatattagcggtaatacactcactctttatcagggaggacgaggaattctaaaacaaaaccttcaattagatagtttttcaacttatagagtgtatttttctgtgtccggagatgctaatgtaaggattagaaattctagggaagtgttatttgaaaaaagatatatgagcggtgctaaagatgtttctgaaatgttcactacaaaatttgagaaagataacttttatatagagctttctcaagggaataatttatatggtggtcctattgtacatttttacgatgtctctattaagtag

SEQ ID NO: 262 - DNA, 2310 bp, Bacillus cereus
  source 1..2310: mol_type = genomic DNA
atgaaaaatatgaagaaaaagttagcaagtgttgtaacctgtaccttattagcccctatgttttttaatgggaatgtaaatactgcttacgcggacaacaaaatcaatcaggattcttcaaagcaggaataccaacagaaagagatggatcgaaaaggattgcttgggtattattttaaagataaagattttagtaaccttactatgttttcaccaacacgttataatacccttatttatgaccaacaaacagcgaataaattattagataaaaaacaacaagaatatcagtctattcgctggattggtttgattcagagtaacaaaacaggtgacttcacatttgaattatcagatgatgaatgtgcgattatagaaatggatgggaaagtgatttctaataaaggtaaagaaaagcaagttgtccatttagagaaaggaaaattagttccaattaaaattgagtatcaattagacgagccattaaatatcgatgatgaaaaattcaaagggtttaaattattgaaagtagataatcaaaaacaactacatcaagtacaacaagatgaattaagaaaccctgaatttaacaaaaaagagtcacaggaatttttagcgaaagcatcgaaaataaatctttttacgaaaaaaattaagagggacattgatgagggaacggatacagacggtgactctattccggatatgtgggaagaaaatgggtatacgattcaaaatagaatcgctgttaaatggaatgactcgctagcaagtaaagggtatacaaaatttgtttctaatccccttgacagtcacacagttggtgacccttatactgactatgaaaaagcatcgagagatttagatttgtcaaatgcaaaagaaacatttaacccattggtagctgcttttccaagcgtgaatgttagcatggaaaaggtgatattatctccaaataaaaacttatctaatagtgtagaatcgcactcatctacgaattggtcttataccaatactgaaggagcatctgttgaagctgggattgggcctaaaggtttttcttttggggtaagtgcaaactatcaacattctgaaacagttgcacaggaatggggggcatctataggagatactacgcaacttaatactgcgtcagcaggatatttaaatgcaaatgttcgatacaacaatgtgggaacaggagccatttatgatgtaaaacctacaactagctttgtattagaaaagaatacaatcgcaactattacggcaaaatcaaattcaacagctttaagtatatctccgggagaaagttatccgaaaaaaggccaaaatggaattgcgataacatccatggatgattttaactcacatccaattacattaaataaaaaacaattagatcaagtattgactaataaccctattatgttagaaacagaccagacagatgggatttataagataaaagatacacatggtaatattgtcacaggtggcacatggaatggtgtaactcaacaaattaaagcaaaaacagcgtctattattgtggatgacgggaaacaggtagcagaaaaacgtgtggcggcaaaagattatgcttatccagaagataaaacaccgtctttaactttaaaagatgcactgaagctttcattcccagaagagataaaagaaacagatggattattgtactataacaacaaaccaatttatgaatcgagtgtcatgacctaccttgatgggaatacggcaaaggaagtaaaaaaacaaataaatgataaaacaggggaatttaaggatgtccaacatttatatgctgttaaacttacacccaaaatgaattttactattaaagtaccggttgcgtatgatacagccaaacaggctgttaatcttggaggggataatccatggggggctaaaggattattagggacatgggtaaatgccatggttgtagataattccggagataaagcatataaaagggttgaacctggttatctactttcacctacattggagttttcagaaggttcattagacaatttaaagaaaaattatagtttttatgttagtatgtacgtgaaatcagataaaccatttactctaagaataaatgctggaccctatagtaccaagagaaccatagaagcatcaaatgattttaaacgcgttgatattcctgcgttttatatagaaggatttccgatagacactataagattagaaggttctgactatccatcggcaatatggtggaaagatgtttcaattacagaagtgtcagcagtaaaaaaataa

SEQ ID NO: 263 - DNA, 1389 bp, Bacillus cereus
  source 1..1389: mol_type = genomic DNA
atgaaaagaatggagggaaagttgtttatggtatctaaaaagttacaattagttactaaagctttattgtttagtacagttttatctatacctttattaaataatgaagaggtaaaagctgaacatttaaatctaaattctcaaagtaaatatcctagctttcaaaatcaaaaaatcactgataatgcagaggattttaaagaggataaggaaaaagcgaaagaatggggagaagtaaaagaaaaagagtggaaattaaccgctactgaaaaaagaaaaataaatgactttttaaatgatacaaacaaaataaaaacaaattataaagaaattactttttctatggcaggttcatttgaagatgaactgaaagatttaaaagaaattgataagatgtttgataaagccaatctctcaagttctattatcacctataaaaatgtggaacccgcaacaattggatttaataagtctttaacagaaggaaatacaattaattctgatgtaatggcgcagtttaaagaacaatttctaggaaaagatattaagtttgatagttatctagatactcatttaactgtccaacaagtttctagtaaagaaagagttattttgaaggttacagtgccgagtgggaagggttctactaatccaacaaaagcaggtgttattttagatggaaatgaacacaaaatgctcattgataatgggtatgtactccatgttgataaggtatcaaaggtagtaaaaaaggggctggagtgcttgcaagtggaagggaccttaaaaaagagtcttgactttaaaaatgatataagtgctaaagcgcatagttggggcatgaaaaattatgaagaatgggctgcaaatttaaccgattcccaaagaaaagctttagatggctatgctaggcaagattataaaaaaatcaatgattatttacgaaatcaaggcggaagtggaaatgaacaattggatgcacaaataaagaacatttctgaaactttaaacaataagccaataccagaaaatattactgtgtatagatggtgtggtatgccagaatttggttatcaaattagtgagcctttacctgccttaaaagattttgaatgggaatttttaaacacaatcaaggaagacaaaggatatattagtacgagcttatcaagtgaacgtctagcggcttttgggtcaagaaaaattatattacgattacaaatcccaaaaggaagtaaaggcgcatatttaagtgccattggtggatttgcaaatgaaaaagaaattcttctggataaagatagtaagtatcatatcaataaaataacagaagtagtcattaaaggcattaagcgatatgtagttgatgcaacattattaacaaattaa

SEQ ID NO: 264 - DNA, 1104 bp, Bacillus thuringiensis
  source 1..1104: mol_type = genomic DNA
atgaaaaatagattttcaaaagtggcattatgcaccgtaccgattttaatggtttctacattcgccagttcaagcatgtcagcttttgctgcagaagccaaatcaccagatttaaatgtatctcaacaagtaataggtccctatgccgaatcttatattgatattgtgcaggatagaatgaaacaaagggataagggatcaaaattaactggtaaaccaataaatatgcaagaacaaataatagatgggtggtttctagctagattttggatatttaaggatcaaaacaataaccatcagacaaatagatttatatcctggtttaaagataatattgctagttcaaaagggtataatagtattgcggagcaaatgggtttaaaaatagaagcagaaaacgatatggatgtaacaaatatagattatacatctaagacaggcgataccatttataatggtatttcagaattgaaaaattatacaggatcaactcaaaagatgaaaacagatagttttcaaagagattatacaaaatcagaatctacttcagtaactaatggattacaattaggatttaaagttgctgctaaaggagtagttgctttggctggggcagactttgaaaccagtgttacttataatctatcaactactacaactgaaacaaatacaatatcagacaagtttactgtcccatctcaagaagttacattgcctccaggacataaagcgatagtgaaacatgatttaagaaaaatggtttattctggtactcatgatctaaagggtgatttaattgtgagttttaatgataaagagattgtacaaaaatttatttatccaaattatagagaaattaatttatctgatatccgtgaaactatgattgaaattgatgaatggaatcatgtaaaccctgtgaatttttatgaattagttggggtcaaaaatcatataaaaaatggtgaaactttgtatatagatactccagctaaatttatgtttaatggtgctaatccatattatagagcaacatttacagaatacgacgggaataataatcctgttcaaacaaaggtattaagtgaaaactttaaattgtag

SEQ ID NO: 265 - DNA, 2862 bp, Spodoptera exigua
  source 1..2862: mol_type = genomic DNA
attgtgaagtgaaatgagatcataatatatttgtgtgtagcgatatttttattaagtagataaatttaaggaccataaatgaagaacctctaacaatttataatttgtgtaaaacataataaacagtttttaactgtgaatgtgcattaccgatttagtatgtgatttaaccccagtgataagagacttatcacttgctgttatttatataactttgatctgattacgaatcttaattaattacaaaatgtatatacatcgatcgactgtgttacgactgtgtgtgtgggtgagcctgttggctctatgtggggcccaacgcgcagagcaactcctggcacagaatccttgctccagcaagacgacgtgcagtgactgcatccgcacggccagctgcgcttggcgttttgcaggagagttcaatggccctcggtgcttcaaccctgccatggagcgagatggcactgcaggatgtgaagaatcctacatattcaacccagataataaacgctctgtcgaccccatgtacaatatggagttaagcagagctaagtctagaatgggcatgtctgctggttcatcttcttatgaagagtcttacagtgcacagggcagtagctttgctgcatcgggatcggcagcaggcgcaggcgctgaagcaggtggcgaaagattggtgcagatgaaacctcagaaagtgaatctcaacctcagaatgaatcaaatgcagaaacttacatttgcgtactccagagctcaagattatcctgttgacttatattaccttatggacttgagtagatctatgaaaaacgatagagagaaactcagtaccctgggaagtttactgtctgctaccatgaggaatatgacgtccatgttcaggatcgggttcggctcctttgtagataaactagtcatgccttatgtatctacagtgcctaagaatttgatatcaccttgcgacggttgcgcagcgccttatggataccaaaatcaaatgtctctgagtactgacaccgacttctttgagaaagcagtagctaacgcagacgtgccgggcaacttggacgcccccgaaggagggttcgacgcgatcatgcaagccgtggtgtgcaagcaacagatcggctggcgagaccaggctaggcgacttcttgttttctccacagacgctggtttccattatgctggcgacggaaagctcggtggtatcgtccaacctaacgatggcgaatgtcacatgaaggacaacacgtacacacactcgacgttgcaggattaccccagcatttcacagattaatcataaggtgaagaagcacgctatcaacgtaatctttgcggtaacggcggaacagatcagcgtgtacgaacagctgagcaagcacatcgaaggttccagtacgggagtgctgagcaacgattccgataacatcgtcgacctcgtccgggaacaatacaacaaaattacgtcaactgtagaaatgaaagactcatcgagtgacgctgtgcaaatagtgtattactcatcttgtctcagcggcaaagaactcacacagacgaacaaatgcgacggattaaaggttggcgatgtcgtggaattcacggctgagattacattgaaagaatgtcccaaagaccgcagcaagtggaagcagactttcgagatctcccccgtcggtatctctgacagcctcactgttgaactggaaatggtctgcgactgtccctgtgaacagcccaatcatcacgcgtacaacgacagtccgctagtatgcagcggcgagggcgtgtctgcgtgcggggtgtgcgtgtgccggccgggccgcttcggcaagaactgcgagtgctcggcgcacggcggcgtctccgccgagcaggagcgcggctgccgccccaccaacgccagcgccggcccgctctgctccaaccgcggcacctgcatctgcggcgtctgcgagtgcaacaagatggacgacccgctcaaggtgatttctggcccgttctgcgagtgcgataacttcacgtgtgacatgaacaaaggtttgctctgctcgggccccgaccacggggaatgtgtctgtggcaaatgtagctgtactcccgagtacaccggaccagcttgccagtgtttgaaggaccaaactccttgtcgatcacctgaaaataacgaaatatgtagcggtaacggaaaatgtgtctgcggtcagtgcgtgtgcaatgtagatgacgaccgtcattattccggaaaatactgtgaaaaatgtcccacctgcccaggccgctgtggtgaattcaaagactgtgtattatgcgaggtacacaaacgtggcccgctgtacaatgccgacacagacacctgtggcgactgtgcgctctatcccataatcgaagaaggcaaaattgaagccaacgaatctcgaaacgaacatttgtgtagtttctacgacgatgaagattgtttatatgtgtacgtgtactcctacaatgagaaccagcagcttgtcattagagcacagaaggaacgggaatgtcccaagaaggtaccaatcttgggaattgtgttgggagtgatcgctgcgatagtgttggttggtttggctttactgatgttatggaagatggcgactactatacacgaccgcagagagtttgcgcgcttcgagaaagaacgtatgatggccaaatgggacacgggcgagaaccctatttacaagcaagcaacatcgaccttcaaaaatcctacatatgctggaaaataattgtattacattacacaaaatagtcagcaaataaaatagtcgtctcaaaacgtaaagcaatcgaatgccgcatttataaaattatcaagatgtcagta

SEQ ID NO: 266 - DNA, 766 bp, Helicoverpa zea
  source 1..766: mol_type = genomic DNA
tgatttcgaattccatcgttcattccaagatgttcaatcaaactcagttgtttgtttttctcgctgtattcactacgagcagtgttttagggaataacaatgatgttaaggatggcgcagcgagtggagctcacagcgaccgactaggtctttggttcggtccccggctaggcaagcgctcgctcagaatatctaccgaagataacagacaagcattcttcaaattactcgaagccgccgacgctttgaaatactattacgaccagctaccttatgagatgcaagctgatgaacctgaaaccagggtcaccaagaaggtgatcttcacccccaagttaggcagaagcctcgcatacgatgacaaaagctttgagaacgtggagttcacgcccagactcggcaggagactgtccgatgatatgcctgccacccccgctgaccaggaaatgtaccgccaagaccctgaacagattgacagcaggacaaagtacttctccccaaggctcggcagaaccatgaacttctcaccacgactcggcagggaactgtcttatgatatgatgccaaataaaatcagggtagtcaggagtacaaacaaaacgcgatcaacataatttggagcaaaaacaagacgcaaagctagtctaacctcaaaatttttataaaacgtgttattttggacgaaataatgtactgttttgtataataagtattattaaataatattaaaaattagtattttgtcgaaataaaggacttaagatat

SEQ ID NO: 267 - DNA, 3468 bp, Bacillus thuringiensis
  source 1..3468: mol_type = genomic DNA
atggataacaatccgaacatcaatgaatgcattccttataattgtttaagtaaccctgaagtagaagtattaggtggagaaagaatagaaactggttacaccccaatcgatatttccttgtcgctaacgcaatttcttttgagtgaatttgttcccggtgctggatttgtgttaggactagttgatataatatggggaatttttggtccctctcaatgggacgcatttcttgtacaaattgaacagttaattaaccaaagaatagaagaattcgctaggaaccaagccatttctagattagaaggactaagcaatctttatcaaatttacgcagaatcttttagagagtgggaagcagatcctactaatccagcattaagagaagagatgcgtattcaattcaatgacatgaacagtgcccttacaaccgctattcctctttttgcagttcaaaattatcaagttcctcttttatcagtatatgttcaagctgcaaatttacatttatcagttttgagagatgtttcagtgtttggacaaaggtggggatttgatgccgcgactatcaatagtcgttataatgatttaactaggcttattggcaactatacagatcatgctgtacgctggtacaatacgggattagagcgtgtatggggaccggattctagagattggataagatataatcaatttagaagagaattaacactaactgtattagatatcgtttctctatttccgaactatgatagtagaacgtatccaattcgaacagtttcccaattaacaagagaaatttatacaaacccagtattagaaaattttgatggtagttttcgaggctcggctcagggcatagaaggaagtattaggagtccacatttgatggatatacttaacagtataaccatctatacggatgctcatagaggagaatattattggtcagggcatcaaataatggcttctcctgtagggttttcggggccagaattcacttttccgctatatggaactatgggaaatgcagctccacaacaacgtattgttgctcaactaggtcagggcgtgtatagaacattatcgtccactttatatagaagaccttttaatatagggataaataatcaacaactatctgttcttgacgggacagaatttgcttatggaacctcctcaaatttgccatccgctgtatacagaaaaagcggaacggtagattcgctggatgaaataccgccacagaataacaacgtgccacctaggcaaggatttagtcatcgattaagccatgtttcaatgtttcgttcaggctttagtaatagtagtgtaagtataataagagctcctatgttctcttggatacatcgtagtgctgaatttaataatataattccttcatcacaaattacacaaatacctttaacaaaatctactaatcttggctctggaacttctgtcgttaaaggaccaggatttacaggaggagatattcttcgaagaacttcacctggccagatttcaaccttaagagtaaatattactgcaccattatcacaaagatatcgggtaagaattcgctacgcttctaccacaaatttacaattccatacatcaattgacggaagacctattaatcaggggaatttttcagcaactatgagtagtgggagtaatttacagtccggaagctttaggactgtaggttttactactccgtttaacttttcaaatggatcaagtgtatttacgttaagtgctcatgtcttcaattcaggcaatgaagtttatatagatcgaattgaatttgttccggcagaagtaacctttgaggcagaatatgatttagaaagagcacaaaaggcggtgaatgagctgtttacttcttccaatcaaatcgggttaaaaacagatgtgacggattatcatattgatcaagtatccaatttagttgagtgtttatctgatgaattttgtctggatgaaaaaaaagaattgtccgagaaagtcaaacatgcgaagcgacttagtgatgagcggaatttacttcaagatccaaactttagagggatcaatagacaactagaccgtggctggagaggaagtacggatattaccatccaaggaggcgatgacgtattcaaagagaattacgttacgctattgggtacctttgatgagtgctatccaacgtatttatatcaaaaaatagatgagtcgaaattaaaagcctatacccgttaccaattaagagggtatatcgaagatagtcaagacttagaaatctatttaattcgctacaatgccaaacacgaaacagtaaatgtgccaggtacgggttccttatggccgctttcagccccaagtccaatcggaaaatgtgcccatcattcccatcatttctccttggacattgatgttggatgtacagacttaaatgaggacttaggtgtatgggtgatattcaagattaagacgcaagatggccatgcaagactaggaaatctagaatttctcgaagagaaaccattagtaggagaagcactagctcgtgtgaaaagagcggagaaaaaatggagagacaaacgtgaaaaattggaatgggaaacaaatattgtttataaagaggcaaaagaatctgtagatgctttatttgtaaactctcaatatgatagattacaagcggataccaacatcgcgatgattcatgcggcagataaacgcgttcatagcattcgagaagcttatctgcctgagctgtctgtgattccgggtgtcaatgcggctatttttgaagaattagaagggcgtattttcactgcattctccctatatgatgcgagaaatgtcattaaaaatggtgattttaataatggcttatcctgctggaacgtgaaagggcatgtagatgtagaagaacaaaacaaccaccgttcggtccttgttgttccggaatgggaagcagaagtgtcacaagaagttcgtgtctgtccgggtcgtggctatatccttcgtgtcacagcgtacaaggagggatatggagaaggttgcgtaaccattcatgagatcgagaacaatacagacgaactgaagtttagcaactgtgtagaagaggaagtatatccaaacaacacggtaacgtgtaatgattatactgcgactcaagaagaatatgagggtacgtacacttctcgtaatcgaggatatgacggagcctatgaaagcaattcttctgtaccagctgattatgcatcagcctatgaagaaaaagcatatacagatggacgaagagacaatccttgtgaatctaacagaggatatggggattacacaccactaccagctggctatgtgacaaaagaattagagtacttcccagaaaccgataaggtatggattgagatcggagaaacggaaggaacattcatcgtggacagcgtggaattacttctcatggaggaatag

SEQ ID NO: 268 - DNA, 3468 bp, Bacillus thuringiensis
  source 1..3468: mol_type = genomic DNA
atggataacaatccgaacatcaatgaatgcattccttataattgtttaagtaaccctgaagtagaagtattaggtggagaaagaatagagactggttacaccccaatcgatatttccttgtcgctaacgcaatttcttttgagtgaatttgttcccggtgctggatttgtgttaggactagttgatataatatggggaatttttggtccctctcaatgggacgcatttcttgtacaaattgaacagttaattaaccaaagaatagaagaattcgctaggaaccaagccatttctagattagaaggactaagcaatctttatcaaatttacgcagaatcttttagagagtgggaagcagatcctactaatccagcattaagagaagagatgcgtattcaattcaatgacatgaacagtgcccttacaaccgctattcctctttttgcagttcaaaattatcaagttcctcttttatcagtatatgttcaagctgcaaatttacatttaccagttttgagagatgtttcagtgtttggacaaaggtggggatttgatgccgcgactatcaatagtcgttataatgatttaactaggcttattggcaactatacagatcatgctgtacgctggtacaatacgggattagagcgtgtatggggaccggattctagagattggataagatataatcaatttagaagagaattaacactaactgtattagatatcgtttctctatttccgaactatgatagtagaacgtatccaattcgaacagtttcccaattaacaagagaaatttatacaaacccagtattagaaaattttgatggtagttttcgaggctcggctcagggcatagaaggaagtattaggagtccacatttgatggatatacttaacagtataaccatctatacggatgctcatagaggagaatattattggtcagggcatcaaataatggcttctcctgtagggttttcggggccagaattcacttttccgctatatggaactatgggaaatgcagctccacaacaacgtattgttgctcaactaggtcagggcgtgtatagaacattatcgtccactttatatagaagaccttttaatatagggataaataatcaacaactatctgttcttgacgggacagaatttgcttatggaacctcctcaaatttgccatccgctgtatacagaaaaagcggaacggtagattcgctggatgaaataccgccacagaataacaacgtgccacctaggcaaggatttagtcatcgattaagccatgtttcaatgtttcgttcaggctttagtaatagtagtgtaagtataataagagctcctatgttctcttggatacatcgtagtgctgaatttaataatataattccttcatcacaaattacacaaatacctttaacaaaatctactaatcttggctctggaacttctgtcgttaaaggaccaggatttacaggaggagatattcttcgaagaacttcacctggccagatttcaaccttaagagtaaatattactgcaccattatcacaaagatatcgggtaagaattcgctacgcttctaccacaaatttacaattccatacatcaattgacggaagacctattaatcaggggaatttttcagcaactatgagtagtgggagtaatttacagtccggaagctttaggactgtaggttttactactccgtttaacttttcaaatggatcaagtgtatttacgttaagtgctcatgtcttcaattcaggcaatgaagtttatatagatcgaattgaatttgttccggcagaagtaacctttgaggcagaatatgatttagaaagagcacaaaaggcggtgaatgagctgtttacttcttccaatcaaatcgggttaaaaacagatgtgacggattatcatattgatcaagtatccaatttagttgagtgtttatctgatgaattttgtctggatgaaaaaaaagaattgtccgagaaagtcaaacatgcgaagcgacttagtgatgagcggaatttacttcaagatccaaactttagagggatcaatagacaactagaccgtggctggagaggaagtacggatattaccatccaaggaggcgatgacgtattcaaagagaattacgttacgctattgggtacctttgatgagtgctatccaacgtatttatatcaaaaaatagatgagtcgaaattaaaagcctatacccgttaccaattaagagggtatatcgaagatagtcaagacatagaaatctatttaattcgctacaatgccaaacacgaaacagtaaatgtgccaggtacgggttccttatggccgctttcagccccaagtccaatcggaaaatgtgcccatcattcccatcatttctccttggacattgatgttggatgtacagacttaaatgaggacttaggtgtatgggtgatattcaagattaagacgcaagatggccatgcaagactaggaaatctagaatttctcgaagagaaaccattagtaggagaagcactagctcgtgtgaaaagagcggagaaaaaatggagaggcaaacgtgaaaaattggaatgggaaacaaatattgtttataaagaggcaaaagaatctgtagatgctttatttgtaaactctcaatatgatagattacaagcggataccaacatcgcgatgattcatgcggcagataaacgcgttcatagcattcgagaagcttatctgcctgagctgtctgtgattccgggtgtcaatgcggctatttttgaagaattagaagggcgtattttcactgcattctccctatatgatgcgagaaatgtcattaaaaatggtgattttaataatggcttatcctgctggaacgtgaaagggcatgtggatgtagaagaacaaaacaaccaccgttcggtccttgttgttccggaatgggaagcagaagtgtcacaagaagttcgtgtctgtccgggtcgtggctatatccttcgtgtcacagcgtacaaggagggatatggagaaggttgcgtaaccattcatgagatcgagaacaatacagacgaactgaagtttagcaactgtgtagaagaggaagtatatccaaacaacacggtaacgtgtaatgattatactgcgactcaagaagaatatgagggtacgtacacttctcgtaatcgaggatatgacggagcctatgaaagcaattcttctgtaccagctgattatgcatcagcctatgaagaaaaagcatatacagatggacgaagagacaatccttgtgaatctaacagaggatatggggattacacaccactaccagctggctatgtgacaaaagaattagagtacttcccagaaaccgataaggtatggattgagatcggagaaacggaaggaacattcattgtggatagcgtggaattacttcttatggaggaataa

SEQ ID NO: 269 - DNA, 3687 bp, Bacillus thuringiensis
  source 1..3687: mol_type = genomic DNA
atgacttcaaataggaaaaatgagaatgaaattataaatgctgtatcgaatcattccgcacaaatggatctattaccagatgctcgtattgaggatagcttgtgtatagccgaggggaacaatatcgatccatttgttagcgcatcaacagtccaaacgggtattaacatagctggtagaatactaggcgtattgggcgtaccgtttgctggacaactagctagtttttatagttttcttgttggtgaattatggccccgcggcagagatcagtgggaaattttcctagaacatgtcgaacaacttataaatcaacaaataacagaaaatgctaggaatacggctcttgctcgattacaaggtttaggagattccttcagagcctatcaacagtcacttgaagattggctagaaaaccgtgatgatgcaagaacgagaagtgttctttatacccaatatatagctttagaacttgattttcttaatgcgatgccgcttttcgcaattagaaaccaagaagttccattattgatggtatatgctcaagctgcaaatttacacctattattattgagagatgcctctctttttggtagtgaatttgggcttacatcgcaggaaattcaacgctattatgagcgccaagtggaacgaacgagagattattccgactattgcgtagaatggtataatacaggtctaaatagcttgagagggacaaatgccgcaagttgggtacggtataatcaattccgtagaggtctaacgttaggagtattaggtctagtggcactattcccaagctatgacactcgcacttatccaataaatacgagtgctcagttaacaagagaagtttatacagacgcaattggagcaacaggggtaaatatggcaagtatgaattggtataataataatgcaccttcgttctctgccatagaggctgcggctatccgaagcccgcatctacttgattttctagaacaacttacaatttttagcgcttcatcacgatggagtaatactaggcatatgacttattggcgggggcacacgattcaatctcggccaataggaggcggattaaatacctcaacgcatggggctaccaatacttctattaatcctgtaacattacggttcgcatctcgagacgtttataggactgaatcatatgcaggagtgcttctatggggaatttaccttgaacctattcatggtgtccctactgttaggtttaattttacgaaccctcagaatatttctgatagaggtaccgctaactatagtcaaccttatgagtcacctgggcttcaattaaaagattcagaaactgaattaccaccagaaacaacagaacgaccaaattatgaatcttacagtcacaggttatctcatataggtataattttacaatccagggtgaatgtaccggtatattcttggacgcatcgtagtgcagatcgtacgaatacgattggaccaaatagaatcacccaaatcccaatggtaaaagcatccgaacttcctcaaggtaccactgttgttagaggaccaggatttactggtggggatattcttcgaagaacgaatactggtggatttggaccgataagagtaactgttaacggaccattaacacaaagatatcgtataggattccgctatgcttcaactgtagattttgatttctttgcatcacgtggaggtactactgtaaataattttagattcctacgtacaatgaacagtggagacgaactaaaatacggaaattttgtgagacgtgcttttactacaccttttacttttacacaaattcaaaatataattcgaacgtctattcaaggccttagtggaaatggggaagtgtatatagataaaattgaaattattccagttactgcaaccttcgaagcagaatatgatttagaaagagcgcaagaggcggtgaatgctctgtttactaatacgaatccaagaagattgaaaacagatgtgacagattatcatattgatcaagtatccaatttagtggcgtgtctatcggatgaattctgcttggatgaaaagagagaattacttgagaaagtgaaatatgcgaaacgactcagtgatgaaagaaacttactccaagatccaaacttcacatccatcaataagcaaccagacttcatatctactaatgagcaatcgaatttcacatctatccatgaacaatctgaacatggatggtggggaagtgagaacattaccatccaggaaggaaatgacgtatctaaagagaattacgtcacactaccgggtacttttaatgagtgttatccgacgtatttatatcaaaaaataggggagtcggaattaaaagcttatactcgctaccaattagaaggttatattgaagatagtcaagatttagagatatatttgattcgttataatgcgaaacatgaaacattggatgttccaggtaccgagtccctatggccgctttcagttgaaagcccaatcggaaggtgcggagaaccgaatcgatgcgcaccacattttgaatggaatcctgatctagattgttcctgcagagatggagaaaaatgtgcgcatcattcccatcatttctctttggatattgatgttggatgcacagacttgcatgagaatctaggcgtgtgggtggtattcaagattaagacgcaggaaggtcatgcaagactagggaatctggaatttattgaagagaaaccattattaggagaagcactgtctcgtgtgaagagggcagagaaaaaatggagagacaaacgtgaaaaactacaattggaaacaaaacgagtatatacagaggcaaaagaagctgtggatgctttattcgtagattctcaatatgatagattacaagcggatacaaacatcggcatgattcatgcggcagataaacttgttcatcgaattcgagaggcgtatctttcagaattacctgttatcccaggtgtaaatgcggaaatttttgaagaattagaaggtcacattatcactgcaatctccttatacgatgcgagaaatgtcgttaaaaatggtgattttaataatggattaacatgttggaatgtaaaagggcatgtagatgtacaacagagccatcatcgttctgaccttgttatcccagaatgggaagcagaagtgtcacaagcagttcgcgtctgtccggggtgtggctatatccttagtgtcacagcgtacaaagagggatatggagagggctgcgtaacgatccatgaaatcgagaacaatacagacgaactaaaatttaaaaaccgtgaagaagaggaagtgtatccaacggatacaggaacgtgtaatgattatactgcacaccaaggtacagctggatgcgcagatgcatgtaattcccgtaatgctggatatgaggatgcatatgaagttgatactacagcatctgttaattacaaaccgacttatgaagaagaaacgtatacagatgtaagaagagataatcattgtgaatatgacagagggtatgtcaattatccaccagtaccagctggttatgtgacaaaagaattagaatacttcccagaaacagatacagtatggattgagattggagaaacggaaggaaagtttatggtagatagcgtggaattactcctcatggaagaatag

SEQ ID NO: 270 - DNA, 3531 bp, Bacillus thuringiensis
  source 1..3531: mol_type = genomic DNA
atggagaataatattcaaaatcaatgcgtaccttacaattgtttaagtaatcctgaggagatacttttagatggagaaagaatatcaactggtaattcatcaattgatatctctctgtcacttgtccagcttctggtatctaactttgtaccagggggaggatttttagttggattattagattttgtatggggaatagtaggcccttctccatgggatgcatttctagtgcaaattgaacaattaattaatgaaagaatagctgcatatgctaggtctgcagcaatttctaatttagaaggattaggaaacaatttcaatatatatgtggaagcatttaaagaatgggaagcagatcctgataatccagtaaccaggactagagtagttgatcgctttcgtatacttgatgggctacttgaaagggacatcccttcatttcgaattgctggatttgaagtaccccttttatccgtttatgctcaagcggccaatttgcatctagctatattaagagattcttcaatttttggagcaagatggggattgacaacaataaatgtcaatgaaaactataataggctaattaggcatattgatgaatatgctaatcactgtgcagatacgtataatcggggataaaataatttaccaaaatctacgtatcaagattggataacatataatcgattacggagagacttaacattaactgtattagatatcgctgctttctttccaagctatgacaataggagatatccaattcagtcagttggtcaactaacaagggaaatttatacggacccattaattacttttaatccacagttacagtctgtagctcaattacctacttttaacgttatggaaagcaacgcaattagaactcctcatttatttgatgtattgaataatcttacaatttttacagattggtttagtgttggacgcaacttttattggggaggacatcgagtaatatctaaccgtataggaggaggtaacataacatctcctatatatggaagagaggcgaatcaggagcctccaagatcttttacttttaatgggcctgtttttaggactttatcaaatcctacttttagacctttacagcaaccttggccagcgccaccatttaatttacgtggtgttgaaggagtagaattttctacacctttaaatagctttacgtatcgaggaagaggtacggttgattctttaactgagttaccgcctgaggataatagtgtgcctcctcgcgaaggatatagtcatcgtttatgtcatgcaacttttgttcaaagatctggaaccccatttttaacaactggtccagtattttcttggacgcatcgtagtgctactgatcgaaatataatctacccggatgtaattaaccaaataccgttagtaaaagcattcaaccttacttcaggtacctctgtagtcagaggtccaggatttacaggaggggatatcatccgaactaacgttaatggtagtgtactaagtatgagtcttaattttagtaacacaacattacagcagtatcgtgtgtgagttcgttatgctgcttctcaaacaatggtcatgagcgtaactgttggagggagtactactggtaatcaaggattccctagtactatgagtgcaaatggggctttgacatctcaatcatttagattcgcagaatttcctgtaggtattagtgcatctggcagtcaaggtgcatcaataagtattagtaataatgtaggtagacaaatgtttcacttagatagaattgaatttctcccagttacttctacatttgaggaggaatatgatttagaaagagcgcaagaggcggtgaatgccctgtttacttctacgaaccaactagggctaaaaacagatgtaacggattatcatattgatcaagtatcaaatctagttgaatgcttatcggatgaattttgtctggatgaaaagcgagaattgtctgagaaagtcaaacatgcgaagcgactcagcgatgagcgcaatttactccaggatcgaaatttcagatccattaatgggcaactaggccgtggctggagaggaagtacggatattaccatccaaggtggagatgacgtattcaaagagaattacgtcacactgccgggtacctttgatgagtgctatccaacgtatctatatcaaaaaatagatgaatcgaaattaaaatcctatacacgttacgagttaagagggtatatcgaggatagtcaagatttagaaatctatttgattcgctacaatgcaaaacacgaaatagtaaatgtaccaggtacagggagtttatggcctctttctatagaaaattcaattgggccttgtggagaaccgaatcgctgcgcgccacaccttgaatggaatcctaatctagattgttcctgcagggacggggaaaaatgtgcccatcattcccatcatttctccttggacattgatgttggatgtacagacttaaatgaggacttaggtgtatgggtgatcttcaagattaagacgcaagatggccatgcaagactaggaaatctagagtttctcgaagagaaaccactattaggggaagcactagctcgtgtgaaaagagcggagaagaaatggagagacaaacgtgaaaaattggaatgggaaacaaatattgtttataaagaggcaaaagaatctgtagatgctttatttgtgaactctcaatatgatagattacaagcggatacgaatatcgcgatgattcatgcggcagataaacgcgttcatagaattagagaagcataccttccagaattatctgtaattccgggtgtaaatgcgggcattttcgaagaattagagggacgcattttcacagcctactctctatatgatgcgagaaatgtcattaaaaatggcgatttcaataatggtttattatgctggaacttgaaagggcatgtagatgtagaagaacaaaacaaccatcgttcagtccttgttgtcccggaatgggaagcggaggtgtcccaagaagttcgtgtctgtccaggtcgtggctatatccttcgtgttacagcgtacaaagagggatatggagagggctgcgtaaccattcatgagatcgaagacaatacagacgaactgaaatttagcaactgtgttgaagaggaagtatatccaaacaacacggtaacgtgtaatgattatactgcgactcaagaagaatacgggggtgcgtacacttcccgtaatcatggatatggcaaatcttatgaaagtaattcttccgtacaagctgattatgcgtcagtttatgaagaaaaagcggacacagatggacgaagagataatcattgcgaatctaacagagggtatggggattacacgccactaccagctggttatgtaacaaaagaattagaatacttcccagaaaccgataaggtatgggttgagattggagaaacggaaggaacattcattgtggatagtgtggaattactccttatggaggaataa

SEQ ID NO: 271 - DNA, 8373 bp, Bacillus thuringiensis
  source 1..8373: mol_type = genomic DNA
tgaaaaataaatttattatttgagaaataaaatcacttgaactcttgtcgcaaatgctaaagcctgagaattggatactatcagaaaacatgcaaatgaaaggtgaaggactcatagagattttgggaaatagttattttaaacaattcattaaattggaagatgattcaacctattttctaagactatctttcaagggaacaggtagggtacccatgattgatgaatctagttatttagttttcgcaaatgttaaggatgaaaattttactagagttattaaaaaatttgtcttcaaagggtgagtgttttattggtatttatggtacctatgtagaaaatgcaagtattatttttctaatgtatttattgttaaagagtagaaaagatataatatttaattatacaaaaattaatagaataccttttgaaagtaatattattccaaaaggaaaaagtttttttatttgtacacgctgataaaagaaagatttcttataatattgcattcagttatcatcgagataaacttgaatcattacttttagaaaagttagctccccggtccttattctccatgtaattaaggtcttgaactatccccactttcacttcgtttagaagtgagggattcctaagtaaagagttctatcgaactctaattgattaggctaaccccgcagtccttgcggttagaagccttattgcttcattctttagattgatactcgcgttaatatccctatcatggtttgtacgacaagaaggacagtcccattcacgtaggtttagatttttaacgtctttattttgatatccacaacaagaacgtaattggctggaagcaaatgttttcgatacgacaatgacttgtttgccataccattttgctttgtattctaacatgaatcgaaattgcgaccaagatacctcaataattgcttttgctaacttatgattttttaacatattcgatacttgcaaatcctctataccgataacatcgtggtttttgatgatttcagttgaaattttgtccaagtaatcttttctagtatttgatatgaattctagctatctttactctttgtttattccagcgagaagatcctttcattcttctagaaagaacacgctgtgttttcggaagttcttgtacttctgtttcaactaatagtgacacaaaatatctaccagaaggggttcgtctaacagtcgcatttacaatacgcccctctacttcgcgacttttagcaaatcgaacaaggcctagtttcggtaactttattttgttccctacaacggcaatgttttcatttgtttgttttgtggtataagattgtacgttgttcttcttagatttaaaacgcggtgcgctgttttgttttttgaaaagcgtgtataagcatccgcaaggttgcgaacagacgactgaatcgcaatactatccacttcttttagccaaacaagctctttcttcatggcaggtagtttggcagagaatgtaccataggtcaagccttttcctgtctctttgtatacttgatcccataaggataggaaatgattgaatacaaagcgagaacacccaatcgttttgttgattagaattgcttgtgcctgatttggatagatacgaaacttataggctttattcatcattatgtaattcacctccatttcggtatatgactattatacaccgaacatacattcgatagatagtggagtaacactttctgtatatctaacaattaagatggcttcctgccatcccttgttcgaattcatctcccacctactcactgggctgtggcccttcacgctccttgaggaaggagtcttcttggctaaaataataaatagatctgttttaatataagggatttgtgcccttctcgttatattcttttattagccccaaaaactagtgcaactaaatatttttataattacactgattaaatactttatttttgggagtaagatttatgctgaaatgtaataaaattcgttccattttctgtattttctcataaaatgtttcatatgctttaaattgtagtaaagaaaaacagtacaaacttaaaaggactttagtaatttaataaaaaaaggggatagtttatggaaataaataatcaaaaccaatgtgtgccttacaattgtttaagtaatcctaaggagataatattaggcgaggaaaggctagaaacagggaatactgtagcagacatttcattagggcttattaattttctatattctaattttgtaccaggaggaggatttatagtaggtttactagaattaatatggggatttatagggccttcgcaatgggatatttttttagctcaaattgagcaattgattagtcaaagaatagaagaatttgctaggaatcaggcaatttcaagattggaggggctaagcaatctttataaggtctatgttagagcgtttagcgactgggagaaagatcctactaatcctgctttaagggaagaaatgcgtatacaatttaatgacatgaatagtgctctcataacggctattccactttttagagttcaaaattatgaagttgctcttttatctgtatatgttcaagccgcaaacttacatttatctattttaagggatgtttcagttttcggagaaagatggggatatgatacagcgactatcaataatcgctatagtgatctgactagccttattcatgtttatactaaccattgtgtggatacgtataatcagggattaaggcgtttggaaggtcgttttcttagcgattggattgtatataatcgtttccggagacaattgacaatttcagtattagatattgttgcgttttttccaaattatgatattagaacatatccaattcaaacagctactcagctaacgagggaagtctatctggatttaccttttattaatgaaaatctttctcctgcagcaagctatccaaccttttcagctgctgaaagtgctataattagaagtcctcatttagtagactttttaaatagctttaccatttatacagatagtctggcacgttatgcatattggggagggcacttggtaaattctttccgcacaggaaccactactaatttgataagatcccctttatatggaagggaaggaaatacagagcgccccgtaactattaccgcatcacctagcgtaccaatatttagaacactttcatatattacaggccttgacaattcaaatcctgtagctggaatcgagggagtggaattccaaaatactataagtagaagtatctatcgtaaaagcggtccaatagattcttttagtgaattaccacctcaagatgccagcgtatctcctgcaattgggtatagtcaccgtttatgccatgcaacatttttagaacggattagtggaccaagaatagcaggcaccgtattttcttggacacaccgtagtgccagccctactaatgaagtaagtccatctagaattacacaaattccatgggtaaaggcgcatactcttgcatctggtgcctccgtcattaaaggtcctggatttacaggtggagatattctgactaggaatagtatgggcgagctggggaccttacgagtaaccttcacaggaagattaccacaaagttattatatacgtttccgttatgcttcggtagcaaataggagtggtacatttagatattcacagccaccttcgtatggaatttcatttccaaaaactatggacgcaggtgaaccactaacatctcgttcgttcgctcatacaacactcttcactccaataaccttttcacgagctcaagaagaatttgatctatacatccaatcgggtgtttatatagatcgaattgaatttataccggttactgcaacatttgaggcagaatatgatttagaaagagcgcaaaaggtggtgaatgccctgtttacgtctacaaaccaactagggctaaaaacagatgtgacggattatcatattgatcaggtatccaatctagttgcgtgtttatcggatgaattttgtctggatgaaaagagagaattgtccgagaaagttaaacatgcaaagcgactcagtgatgagcggaatttacttcaagatccaaacttcagagggatcaataggcaaccagaccgtggctggagaggaagtacggatattactatccaaggaggagatgacgtattcaaagagaattacgttacgctaccgggtacctttgatgagtgctatccaacgtatttatatcaaaaaatagatgagtcgaaattaaaagcctatacccgttatcaattaagagggtatatcgaagatagtcaagacttagaaatctatttaattcgttacaatgcaaaacacgaaatagtaaatgtaccaggtacaggaagtttatggcctctttctgtagaaaatcaaattggaccttgtggagaaccgaatcgatgcgcgccacaccttgaatggaatcctgatttacactgttcctgcagagacggggaaaaatgtgcacatcattctcatcatttctctttggacattgatgttggatgtacagacttaaatgaggacttaggtgtatgggtgatattcaagattaagacgcaagatggccacgcacgactagggaatctagagtttctcgaagagaaaccattattaggagaagcactagctcgtgtgaaaagagcggagaaaaaatggagagacaaacgcgaaacattacaattggaaacaactatcgtttataaagaggcaaaagaatctgtagatgctttatttgtaaactctcaatatgatagattacaagcggatacgaacatcgcgatgattcatgcggcagataaacgcgttcatagaattcgagaagcgtatctgccggagctgtctgtgattccgggtgtcaatgcggctatttttgaagaattagaagagcgtattttcactgcattttccctatatgatgcgagaaatattattaaaaatggcgatttcaataatggcttattatgctggaacgtgaaagggcatgtagaggtagaagaacaaaacaatcaccgttcagtcctggttatcccagaatgggaggcagaagtgtcacaagaggttcgtgtctgtccaggtcgtggctatatccttcgtgttacagcgtacaaagagggatatggagaaggttgcgtaacgatccatgagatcgagaacaatacagacgaactgaaattcaacaactgtgtagaagaggaagtatatccaaacaacacggtaacgtgtattaattatactgcgactcaagaagaatatgagggtacgtacacttctcgtaatcgaggatatgacgaagcctatggtaataacccttccgtaccagctgattatgcgtcagtctatgaagaaaaatcgtatacagatagacgaagagagaatccttgtgaatctaacagaggatatggagattacacaccactaccagctggttatgtaacaaaggaattagagtacttcccagagaccgataaggtatggattgagattggagaaacagaaggaacattcatcgtggacagcgtggaattactccttatggaggaataggaccatcccgagtatagcagttttaataaatattaattaaaatagtagtctaacttccgttccaattaaataagtaaattacagttgtaaaaaaaaacggacattactcttcaaagagcgatgtccgttttttatatggtgtgtgctaatgataagtgcgcacgaaattttattgtcaaaatagtatttacttgagaaaaagatcatgttatgtagagatattcccttataatacttgttccacattcataatttttggatgatacattacaacaaaaacagtcgcaaatttatattttctgcataaaatatatagttaagaacctaagaagagaatcaagtagtaggataaaactgaataaggaagtgtagctacaatgaataaaaaaataagaaatgaagatgagcattcatcgatagaattatcatatagtaattcaaaaaatcaaaagcataaggtaccattttgttgtaccatttcaattcctaaaggatgggaagttatatcagaatgccagcccaaaatcgtctatcaacttgattgtctgtctattataaaagaaacgtgtcgcaaagtggttgaggtaaaagattgtggtcaaacggaaatcgatgttaatgtgttaaaaataaaaggatgtatctcttttctgattaatatagaggtgaggccaaaggatgaacgatgtgtttgcttcacagattcccaaaatcaagacatagcattgtgttgtaaagataccgtatgtgtagatcatgtacttcaatgtagtgtggggcatttaccacctcttcatttaaattgtcacaatgtaacagtctgtgatgtaaaagtggtaccggtctgcgatgcggcctgtcaattcgtgaaagtgacagggggttttcaatttcatcctcacttttaaatatcgaggttccgactcccttgtatattgatgattttctcataaaaagtgactataaatataatgttaaagtttgtatatttaatatatttgcagtgggaatggaaaaggggggctttatcatcctttatagcttgtggaaagaggcgaatttaatgggaaattggtttttatttgaagtcctcgatatatgaaacccttcatgtgaatttttaaaaccgtaaccacatttaagaaaaagaaaaatgtttaaactttcatcactataacattaatatttaaatgaagtgggatatattatgcgaaacttcagatagagatagaaaatgaataactaaaaaaattcttacaagatatcattattttaatttgattattgtttctattctgcttattttatgttaaatttaatatgtacatgtaaaatggtttgaaatttagtatgattacatgcaggaaaagagtacgttcgaaaaagaacgtactcttttatatttaccttgattatcttaaaaatataatcatcatttttattaggtataaatttgatatgaaacacatacattcttaaaagtacttgttttttaatagagcaatatagtttgaactatttatttacggtatataaagctgcacgcctacactatacaggatgtatgaaaaaagttttaaaatccacagatatagcaaagtgctcatttgccatatctgtggattttaaaacataggttatgttacaaaaacattataagagattaaccgtcaaagatgtgaaccagatataagccagctagtttttttacgaatgtagtatacccaaacaatttataagacatatgtatacaaaccttaaattcaaagatttattctcaggaactctaaagtatggatgaaagagaaataagccctggttatttaaacggtgaaggaagttcaatatgataaaggaaaatatcagattagaggctctacacaactaaaaaatttggtgaaaaaatataaagaatttagtggaattacagatacttgtgggaaaaatggtggaatgaaaggtgtatcaaattggttaaaagagaaatatccagttatatggtttacgaaatttgcgggtgtacatcgttgaagtattcataccaaaggtatgaaaaatatacggctagaactcgaaaaatgattaaaaaagtaagatctattcacgtaaagcacaaagaatttggttatccacatatgaaaatccctttacaggaagagggatattttataaatcacaagaaagtatatcgcttaaagatggggctaaacatccaatctattattcgaaagaagcgttgcttctttaaagggaactattccaaattttttctgaatgttttaaatcgtgagtttaaagatcgccaacaaaatgaggcacttgttacagatattacttacctacaattccaagaggaatttcggtatctttctgttgtacaaggtgtttataataacgcaggtgtttcttggaaaatatctacgcgtaatgataatgaacttgtattagatacgattgaaatattggcacaaaaaagagacgtgcgtggaaccattctccattcagatcaaggattccagtacacatctcatgcctacaacaaacgactttccgatttaagtatcattggtaactactcccgcaaaggaaactgccataataacgtttgtatcgagtcatttttctcccatttcaaatcggagatgttgtatttgaatcattttaaaacagaagaaaatttaatacaagccaatgaaaaatatatttacttttataactatagacggttcaaaaaacgactcaaccatc

SEQ ID NO: 272 - DNA, 3516 bp, Bacillus thuringiensis
  source 1..3516: mol_type = genomic DNA
atggagatagtgaataatcagaatcaatgcgtgccttataattgtttaaataatcctgaaaatgagatattagatattgaaaggtcaaatagtactgtagcaacaaacatcgccttggagattagtcgtctgctcgcttccgcaactccaataggggggattttattaggattgtttgatgcaatatgggggtctataggcccttcacaatgggatttatttttagagcaaattgagctattgattgaccaaaaaatagaggaattcgctagaaaccaggcaatttctagattagaagggataagcagtctgtacggaatttatacagaagcttttagagagtgggaagcagatcctactaatccagcattaaaagaagagatgcgtactcaatttaatgacatgaacagtattcttgtaacagctattcctcttttttcagttcaaaattatcaagtcccatttttatcagtatatgttcaagctgcaaatttacatttatcggttttgagagatgtttcagtgtttgggcaggcttggggatttgatatagcaacaataaatagtcgttataatgatctgactagacttattcctatatatacagattatgctgtacgctggtacaatacgggattagatcgcttaccacgaactggtgggctgcgaaactgggcaagatttaatcagtttagaagagagttaacaatatcagtattagatattatttcttttttcagaaattacgattctagattatatccaattccaacaagctcccaattaacgcgggaagtatatacagatccggtaattaatataactgactatagagttggccccagcttcgagaatattgagaactcagccattagaagcccccaccttatggacttcttaaataatttgaccattgatacggatttgattagaggtgttcactattgggcagggcatcgtgtaacttctcattttacaggtagttctcaagtgataacaacccctcaatatgggataaccgcaaatgcggaaccaagacgaactattgctcctagtacttttccaggtcttaacctattttatagaacattatcaaatcctttcttccgaagatcagaaaatattactcctaccttagggataaatgtagtacagggagtagggttcattcaaccaaataatgctgaagttctatatagaagtagggggacagtagattctcttaatgagttaccaattgatggtgagaattcattagttggatatagtcatcgattaagtcatgttacactaaccaggtcgttatataatactaatataactagcctgccaacatttgtttggacacatcacagtgctactaatacaaatacaattaatccagatattattacacaaatacctttagtgaaaggatttagacttggtggtggcacctctgtcattaaaggaccaggatttacaggaggggatatccttcgaagaaataccattggtgagtttgtgtctttacaagtcaatattaactcaccaattacccaaagataccgtttaagatttcgttatgcttccagtagggatgcacgaattactgtagcgataggaggacaaattagagtagatatgacccttgaaaaaaccatggaaattggggagagcttaacatctagaacatttagctataccaattttagtaatcctttttcatttagggctaatccagatataattagaatagctgaagaacttcctattcgtggtggtgagctttatatagataaaattgaacttattctagcagatgcaacatttgaagaagaatatgatttggaaagagcacagaaggcggtgaatgccctgtttacttctacaaatcaactagggctaaaaacagatgtgacggattatcatattgatcaagtttccaatttagttgagtgtttatcggatgaattttgtctggatgaaaagagagaattatccgagaaagtcaaacatgcgaagcgactcagtgatgaacggaatttacttcaagatccaaacttcagagggatcaataggcaaccagaccgtggctggagaggaagcacggatattactatccaaggtggagatgacgtattcaaagagaattacgtcacattaccgggtacctttgatgagtgctatccaacgtatttatatcaaaaaatagatgagtcgaagttaaaagcttatacccgctatgaattaagagggtatatcgaggatagtcaagacttagaaatctatttaattcgctacaatgcaaaacacgagacagtaaacgtgccaggtacgggttccttatggccgctttcagcccaaagtccaatcggaaagtgtggagaaccgaatcgatgcgcgccacaccttgaatggaatcctaatctagattgctcctgcagagacggggaaaaatgtgcccatcattcccatcatttctccttggacattgatgttggatgtacagacttaaatgaggacttaggtgtatgggtgatattcaagattaagacacaagatggctatgcaagactaggaaatctagagtttctcgaagagaaaccactattaggggaagcactagctcgtgtgaaaagagcggagaaaaaatggagagacaaatgcgaaaaattggaatgggaaacaaatattgtttataaagaggcaaaagaatctgtagatgctttatttgtaaactctcaatatgatagattacaagcggatacgaatatcgcgatgattcatgcggcagataaacgcgttcatagcattcgagaagcgtatctgccagagctgtctgtgattccgggtgtcaatgcggctatttttgaagaattagaagggcgtattttcactgcattctccctatatgatgcgagaaatgtcattaaaaatggcgatttcaataatggcttatcatgctggaacgtgaaagggcatgtagatgtagaagaacagaacaaccatcgttcggtccttgttgttccagaatgggaagcagaagtgtcacaagaagttcgtgtttgtccgggtcgtggctatatccttcgtgttacagcgtacaaagagggatatggagagggctgtgtaacgattcatgagatcgaagacaatacagacgaactgaaattcagcaactgtgtagaagaggaagtatatccaaacaacacggtaacgtgtaataattatactgcgactcaagaagaacatgagggtacgtacacttcccgtaatcgaggatatgacgaagcctatgaaagcaattcttctgtacatgcgtcagtctatgaagaaaaatcgtatacagatagacgaagagagaatccttgtgaatctaacagaggatatggggattacacaccactaccagctggctatgtgacaaaagaattagagtacttcccagaaaccgataaggtatggattgagatcggagaaacggaaggaacattcatcgtggacagcgtggaattacttcttatggaggaataa

SEQ ID NO: 273 - DNA, 3525 bp, Bacillus thuringiensis
  source 1..3525: mol_type = genomic DNA
atggagaataatattcaaaatcaatgcgtaccttacaattgtttaagtaatcctgaagtagaaatattaagtgaagaaagaagtactggcagattaccgttagatatatccttgtcgcttacacgtttccttttgagtgaatttgttccaggtgtgggagttgcgtttggattatttgatttaatatggggttttataactccttctgaatggagtttatttcttttacagattgaacaactgattgaacaaagaattgaaacattggaaaggaaccgggcaattactacattacgagggttagcggatagctatgaagtttaccttgaggcactaagagagtgggaagaaaatcctaataatgcacaattaagggaagatgtgcgtattcgatttgctaatacagacgacgctttaataacagcaataaataattttacacttacaagttttgaaatccctcttttatcggtctatgttcaagcggcgaatctacatttatcactattaagagatgctgtatcgtttgggcagggttgggggctggatatagctactgttaataatcattataataggttaataaatcttattcatagatatacggaacattgtttggacacatacaatcaaggattagaaaacttaagaggtactaatactcgacaatggtcaagattcaatcagtttaggagagagttaacattgactgtattagatatcgttgctctttttccgaactacgatgctggagcatatccaattcaaacgtcatcccaattaacaagggaaatttatacaagttcagtaattgaagattctccagtttctgctaatatacctaatggttttaatagagcggaatttggagttagaccgccccatcttatggactttatgaattctttgtttgtaactgcagagactgttagaagtcaaactgtgtggggaggacacttagttagttcacgaaatacggctggtaaccctataaatttccctatttatgggatcttcaatcctggtggcgccatttggattgcagatgaggatccacgtcctttttatcggacattatcagatcctgtttttgtccgaggaggatttgggaatcctcattatgtacttgggcttaggggagtagcatttcaacaaactggtacgaaccacacccgaacatttagaaatagtgggaccatagattctctagatgaaatcccacctcaggataatagtggggcaccttggaatgattatagtcatgtattaaatcatgttacatttgtaaggtggcctggtgagattgcaggaagtgattcatggagagcgccaatgttttcttggacacaccgtagtgcagatcgtacaaatatcattaatccaaatataattacacaaatacctgctgtaaaagcacacaatcttcattcgggttctacggttgttagaggacccgggtttacaggtggtgatctcttacgaagaacgaatactggtacatttgcagatataagagtaaatattactgggccattatctcaaagatatcgtgtaagaattcgctatgcttctacgacagatttacaatttttcacgagaatcaatggaacttctgtaaatcaaggtaatttccaaagaactatgaatagagggggtaatttagagtctggaaactttaggactgcaggatttagtacgccttttagtttttcaaatgcgcaaagtacattcacattgggtactcaggctttttcaaatcaggaagtttatatagatcgaattgaatttgtcccggcagaagtaacattcgaggcagaatctgatttagaaagagcgcaaaaggcggtgaatgccctgtttacttctacaagccaactagggctaaaaacaaatgtaacgggttaccatattgatcaagtgtccaatttagttgcgtgtttatcggatgaattttgtctggatgaaaagagagaattgtccgagaaagttaaacatgcgaagcgactcagtgataagcggaatttacttcaagatccaaacttcagagggatcagtaggcaaccagaccatggctggagaggaagtacggatattactatccaaggaggagatgacgtattcaaagagaattacgttacgctaccgggtacttttgatgagtgctatccaacgtatttatatcaaaaaatagatgagtcgaaattaaaagcctatacccgttatcaattaagagggtatatcgaagatagtcaagacttagaaatctatttaattcgttacaattcaaaacacgaaatagtaaatgtaccaggtacagggagtttatggcctctttctgtagaaaatcaaattggaccttgtggagaaccgaatcgatgcgcgccacaccttgaatggaatcctgatttacactgttcctgcagagacggggaaaaatgtgtgcatcattctcatcatttctctttggacattgatgtcggatgtacagatttaaatgaggacctaggtgtatggttgatattcaagattaagacgcaagatggccacgcaagactagggaatctagagtttctcgaagaggaaccgttattaggcgaagcgttagcacgtgtgaagagagcggagaagaagtggagagacaaacgcgagaaactgcagttggaaacaaatattgtctataaagaggcaaaagaatctgtagatgctttatttgtaaactctcaatatgatagattacaagcggatacgaacatcgcgatgattcatgcggcagataaacgcgttcatagaatccgggaagcgtatctgccagagttgtctgtgattccaggtgtcaatgcggccattttcgaagaattagagggacgtatttttacagcgtattccttatatgatgcgagaaatgttattaaaaatggcaatttcaataatggcttattatgctggaacgtgaaagggcatgtagatgtagaagagcaaaacaaccaccgttcggtccttgttatcccagaatgggaagcagaagtgtcacaaaaagttcgtgtctgtccaggtcgtggttatatccttcgtgttacagcgtacaaagagggatatggagaaggtagcgtaacgatccatgagatcgaagacaatacagacgaattaaagtttagcaactgtgtagaagaaggatatccaaacaacacggtaacgtgtaatgagtatactatgaatcaaggggtaggagagtgtacggatgcatgtaatgtccgtaatcgtggatatgaggatgcatatggacacaatccttcaacgcctgttcattacacaacgccgtacgaagaagaaacgtatacagatgaacgaagagagaatccttgtgaagctaacaaagggtatgtgaattacacgccactaccagttggttatgtaacaaaagaattagaatacttcccagaaaccgataaggtatgggttgagattggagaaacggaaggaacattcattgtggatagtgtggaattactccttatggaggaataa

SEQ ID NO: 274 - DNA, 2920 bp, Bacillus thuringiensis
  source 1..2920: mol_type = genomic DNA
atcgatgaaaatatctctgctttttctttctttatttggtatatgctttacttgtaatcgaaaataaagcactaataagagtatttataggtgtttgaagtcatttcagttcatttttaaaggaggtttaaaagtgttagaaagttattaaggaataatacttacagtaaatcctacctatattttacaattaattatgatatttatgcataaattaaaaatgctttatttgacattacagctaagtataattttttatgaataaaattttatttgaaaattaaataatattatatgtgagggattaatatgaaactaaagaatccagataagcatcaaagcttgtctagcaatgcgaaagtagataaaatcgctacggattcactaaaaaatgaaacagatatagaattgaaaaatattaatcatgaggatttcctaagaatgtctgagcatgagagtattgatccgtttgttagtgcatcaacaattcaaacgggtattggaattgctggtaagattcttggtactctaggtgttccttttgctggacaaatagctagcctctatagttttatcttaggcgagctttggcctaaagggaaaagtcaatgggaaatctttatggaacatgtagaagagcttattgaccaaaaaatatcaacttacgcaagaaacatagcacttgcagatttaaaaggcttaggagatgctttggctgtctaccatgaatcgcttgaaagttggattaaaaatcgcaacaacgcaagggctacaagtgttgtcaagagccaatatattgctttagaactattgtttgttcaaaagctgccttcttttgcagtatcaggtgaggaagtaccattattgccaatatatgcacaagctgcaaatttacacttattattactaagagatgcttctgtttttggaaaagagtggggattatctaattcgcaaatttctacattttataatcgtcaagtcgaaagaacgagtgactattccgaccattgtgtgaaatggtatagtacaggtctaaataacttgagaggtacaaatgccgaaagctgggtccgttataatcaatttcgtaaagatatgacattaatggtactagatttaatcgcattattcccaagctatgatacacttgtatatccaattaaaaccacttctcaacttacaagagaagtatatacagacgcaattgggacagtacatccaaatgcaagttttgcaagtacgacctggtataataataatgcaccttcgttctctgccatagagtctgctgttgttcgaaacccgcatctactcgattttttagaacaagttacaatttacagcttattaagtaggtggagtaacactcagtatatgaatatgtggggaggacatagactggaattccgaacaataggtggagtgttaaatacctcaacacaagggtctactaatacttctattaatcctgtaacattaccgttcacgtctcgagacgtctataggactgaatcattggcagggctgaatctatttttaactcaacctgttaatggagtacctagggttgattttcattggaaattcgccacacttccgattgcatctgataatttttattatctagggtatgctggagttggtacgcaattacaagattcagaaaatgaattaccacctgaaacaacaggacagccaaattatgaatcatatagtcatagattatcccatataggactcatttcagcatcccacgtgaaagcattggtatattcttggacacatcgtagtgcagatcgtacaaatacaattgagccaaatagcattacacaaataccattagtaaaagcgttcaatctgtcttcaggtgccgctgtagtgagaggaccaggatttacaggtggggatatccttcgaagaacgaatactggtacatttggggatatacgagtaaatattaatccaccatttgcacaaagatatcgcgtgaggattcgctatgcttctactacagatttacaattccatacgtcaattaacggtaaagctattaatcaaggtaatttttcagcaactatgaatagaggagaggacttagactataaaacctttagaactgtaggctttaccactccatttagcttttcagatgtacaaagtacattcacaataggtgcttggaacttctcttcaggtaacgaagtttatatagatcgaattgaatttgttccggtagaagtaacatatgaggcagaatatgattttgaaaaagcgcaagagaaggttactgcactgtttacatctacgaatccaagaggattaaaaacagatgtaaaggattatcatattgaccaggtatcaaatttagtagagtctctatcagatgaattctatcttgatgaaaagagagaattattcgagatagttaaatacgcgaagcaaatccatattgagcgtaacatgtagaattaaaatctacctaaatccagaaaaataaaagggttaaatatacaattcttgtaccaatattttgagtgattagatgtaggatgaaatttaattgtatgctatttaacagtagagatattaaaaattaatttatctatacattaatagtatagacatacaaacataagagagcattgtcttttcgtaggctacaatgctctctatttactatttatttttcttttgtatcttcaaattgacgttgttctaagcgttctattgcagctcgtcgtttagtatcatcaatgtttgtataaagagatgttgtttccatagaattatgtcccatttgatttgctaataatactaaatctttattttcattatagtgattagtagcataagtatgacgtaatttatgagggcttttcttttcatcaaaagcccttgtgtatttctctgtaagctt

SEQ ID NO: 275 - DNA, 4623 bp, Bacillus thuringiensis
  source 1..4623: mol_type = genomic DNA
tcaatttaaatatttcattttgaatataataaaactaaataatatgaagtttagaatattaatgttatgagctgctatcaaaaggaaagctgctatcaaaaggaaagcaataatgaagaataaataatagcttatatttttaggaaggccaaaagataagctattaaaacatactgaattcattctaaatataggtaatatatttatatttaataaaattcgttgcattttgtgaatattttcataagctgaaccatatgatttaaactggggccaagataaatggcccaaagttataaaggcatatgtgctaaagtccaaaaaacgggaggtaaatcatcaaaaaaatcgtactatacaattttcttaggtaatgctgtgttaaaactaatcagtggagaaaagttaaataggttgtaatgtaagcacaacgtaaaaggaggagttatattgaattcaaataggaaaaatgagaatgaaattataaatgctttatcgattccagctgtatcgaatcattccgcacaaatggatctatcaccagatgctcgcattgaggatagcttgtgtgtagccgaggggaacaatattgatccatttgttagcgcatcaacagtccaaacaggtattagtatagctggtagaatattaggcgtattaggggtgccgtttgccggacaactagctagtttttatagttttcttgttggggaattatggcctagcggcagagatccatgggaaatttttatggaacatgtcgaacaaattgtaagacaacaacaaataacggacagtgttagggataccgctattgctcgtttagaaggtctaggaagagggtatagatcttaccagcaggctcttgaaacttggttagataaccgaaatgatgcaagatcaagaagcattattcgtgagagatatattgctttagaacttgacattactactgctataccgcttttcagcatacgaaacgaagaggttccattattaatggtatatgctcaagctgcaaatttacacctattattattgagagacgcatccctttttggtagtgaatgggggatgtcatctgccgatgttaaccaatattaccaagaacaaatcagatatacagaggaatattctaaccattgcgtacaatggtataatacagggctaaatagattaagagggacaactgccgaaacttgggtacggtataatcaattccgtagagacctaacattaggtgtattagatttagtggcactattcccaagctatgacactcggacttatcccattccaactaccgcccaacttacaagagaagtgtatacagatccaaacggtgttgtagcaggacccaataatagttggtttagaaatggagcttcgttttccgctatagaaaacgcaattattcgacaacctcacctatatgattttctaacgaaccttacaatttacacgagaagaagtcaagtaggcactacaattatgaatttgtgggcagggcatagaatcacgtttaatagaatacaaggtggttctactagtgaaatggtgtatggggctattactaacccagttagtgttagtgacataccatttgtcaatcgggatgtttaccgaactgtatcattagctggtgggcttggctctctgagtggaatacgttatggtttaactagagttgattttgatatgatatttcgtaaccatcctgatatagtaactggattattttatcatccgggacacgcgggcattgcaacccaagtaaaagattcagacacagaattaccacctgaaacgacagaacagccaaattatagagcatttagtcatctactaagtcatatttcaatgggtccaacgactcaagacgtacctccagtatattcttggacacaccagagtgcagatcgtacgaatacaatcaattcggataggataacacaaataccattggtaaaggcgcataccctccaatcgggtaccactgtagtaaaagggccagggtttacaggaggggatatcctccgtcgaacaagtggaggaccatttgcttttagtaatgttaatctagattttaacttgtcacaaaggtatcgtgctagaattcgttatgcctctactactaacctaagaatttacgtaacggttgcaggtgaacgaatttttgctggtcaatttgacaaaacgatggatgctggtgccccattaacattccaatcttttagttacgcaactattaatacagcttttacattcccagaaagatcgagcagcttgactataggtgccgatacgtttagttcaggtaatgaagtttatgtagatagatttgaattaatccaagttactgcaaccttcgaggcagaatctgatttagaaagagcgcggaaggcggtgaatgccttgtttacttctacaaatccaagaggattaaaaacagatgtaacagattatcatatcgaccaagtatccaatctagtagagtgtttatcagatgaattctgcttggataaaaagagagaattactcgaagaagttaaatatgcaaagcgacttagtgatgagcggaatttactccaagatccgacttttacatccattagtggccaaacagaccgtggatggataggaagcactggtattagcattcaaggaggcgatgacatattcaaagaaaattatgtgagactaccaggtaccgttgacgagtgctatccaacgtatttgtatcaaaaaatagatgagtcacaattaaaatcttatactcgctatcaattaagaggctatatcgaagatagtcaagatttagagatttatttgattcgttacaatgcgaaacatgaaacattaagtgtgccaggtactgagtccccatggccatcttcaggagtatatccaagtggaaggtgcggagaaccgaatcgatgtgcaccacgaatcgaatggaatcccgatctagactgttcttgcagatatggagagaaatgcgttcatcattcccatcatttctccttggatattgatgttggatgtacagatttgaatgaggatctaggcgtatgggtgatatttaagattaagacacaagatggccatgcgaaactaggaaatctagaattcatcgaagagaaaccattattaggaaaagcgctgtcccgtgtgaagagagccgagaaaaaatggagagacaaatatgaaaaactacagttggagacaaaacgagtatatacagaggcaaaagaatctgtggatgctttatttgtagactctcaatatgataaattgcaagctaatacgaacatcgggataatccatggggcagataaacaggttcatcgaatccgagaaccgtatctttcagaattacctgtcattccgagtatcaatgcggccatttttgaagaattagagggccatattttcaaagcgtattctctatatgatgcaagaaatgtcataaaaaatggcgatttcaataatggtttatcgtgttggaacgtaaaagggcatgtagatgtacaacagaaccatcatcgttcggtccttgttctctcagaatgggaagcagaagtgtcacaaaaggtacgcgtatgtccagatcgaggctatatccttcgtgtcacagcgtataaagagggatatggagagggatgcgtaacgattcatgaattcgaagataatacggatgtactgaagtttagaaactttgtagaagaggaagtatatccaaacaacacggtaacgtgtaatgattatactacgaatcaaagtgcagaaggatctacggatgcatgtaattcctataatcgtggatatgaggatggatatgagaatagatatgaacccaatccttcagcaccagttaattacacaccgacgtacgaagaaggaatgtatacagatacacagggatataatcattgtgtatctgatcgaggatataggaatcatacaccattaccagctggttatgtaacactagaattagagtatttcccagaaacagagcaagtatggatagaaattggagaaacggaaggaacatttatcgtaggtagcgtggaattactccttatggaggaataggatacgttttaaagtgaaacgtatgcaaataaagaatgatcgctggcctatattgacagataaataaggaaattaatatatgaacaaaaacggacatcactcttaagggtatgatgtccgttttttatatgatttggtttaaagattgatatgtaaatatatttttttacgaaggctttacataaaaaagaatctttatagcaaaatttaaaattaaatcttacatatagctggattgaaaataaagcaaacttattaattgaattatataaaaagattaaatgctattcaagatcttaacattttgttaaatctacttcattaacgttacttaaatgtattttataataatatttagtaacttgtattggtattttaaattttttgattattaaaagacgttaaatataaaaacagaaagaaggaatgaatttggataataactccttattgaaaagtatgcattgagattataaaaactaaaatcgtggtattttttataataacaaccatgttttttttcat

SEQ ID NO: 276 - DNA, 1902 bp, Bacillus thuringiensis
  source 1..1902: mol_type = genomic DNA
atgaatagtgtattgaatagcggaagaactaccattcgtgatgcgtataatgtagtggctcatgatccatttagttttcaacacaaatcattagataccatacaaaacgaatggacggagtggaaaaaaaataatcatagtttatatgtagatcctattgttggaactgtggctagttttctgttaaagaaagtggggagtcttattggaaaaaggatactaagtgagttacggaatttaatatttcctagtggcagtacaaatctaatgcaagatattttaagagagacagaaaaattcctgaatcaaagacttaatacagacactcttgcccgtgtaaatgcggaattgacagggatgcaagcaagtgtagaagagtttaatcgacaagtagataattttttgaaccctaaccgaaacgctgttcctttatcaataacttcttcagttaatacaatgcagcaattatttctaaatagattaccccagttccagatgcaaggataccaactgttattattacctttatttgcacaggcagccaatttacatctttcttttattagagatgttattcttaatgcagatgaatggggaatttcagcagcaacattacgtacgtatcgagattacctgaaaaattatacaagagattactctaactattgtataaatacgtatcaaagtgcgtttagaggcttaaacactcgtttacacgatatgctagaatttagaacatatatgtttttgaatgtatttgaatatgtatctatctggtcgttgtttaaatatcaaagtcttctagtatcttccagttcgaatttatattcaagtggtagtggaccacagcagacccaatcatttacttcacaagactggccatttttatactctcttttccaagttaattcaaattatgtgttaaatggttttagtggtgctaggctttctaataccttccctaatatagttggtttacctggttctactacaactcacgcattgcttgctgcaagggtcaattacagtggaggaatttcgtctggtgatataggtgcatcgccgtttaatcaaaattttacttgtagcacatttctctcccctttgttaacgccatttgttaggagttggctagattcaggttcagatcgggagggtgttgccaccgttacaaattggcaaacagaatcctttgagacaactttagggttaaggagtggtgcttttacagctcgcggtaattcaaactatttcccagattattttattcgtaatatttctggagttcctttagttgttagaaatgaagatttaagaagaccgttgcactataatgaaataagaaatatagcaagtccttcaggaacacctggtggagcacgagcttatatggtatctgtgcataacagaaaaaataatatctatgccgttcatgaaaatggttctatgattcatttagcgccaaatgactatacaggatttactatttcgccaatacatgcaactcaagtgaataatcaaacacgaacatttatttctgaaaaatttggaaatcaaggtgattccttaagggttgaacaaagcaacacgacagctcgttatacgcttagagggaatggaaatagttacaatctttatttaagagtatcttccataggaaattccactattcgagttactataaacggtagagtttatactgctttaaatgttaatactactacaaataacgatggagttaatgataatggagctcgtttttcagatattaatatcggtaatgtagtagcaagtagtaatactgatgtaccattagatgtaaatataacattaaactccggcactcaatttgatcttatgaatattatgcttgtgccaactaatatttcaccactttattaa

SEQ ID NO: 277 - DNA, 1952 bp, Bacillus thuringiensis
  source 1..1952: mol_type = genomic DNA
tccatggatgaatccgaacaatcgaagtgaacatgatacaataaaaactactgaaaataatgaggtgccaactaaccatgttcaatatcctttagcggaaactccaaatccaacactagaagatttaaattataaagagtttttaagaatgactgcagataataatacggaagcactagatagctctacaacaaaagatgtcattcaaaaaggcatttccgtagtaggtgatctcctaggcgtagtaggtttcccgtttggtggagcgcttgtttcgttttatacaaactttttaaatactatttggccaagtgaagacccgtggaaggcttttatggaacaagtagaagcattgatggatcagaaaatagctgattatgcaaaaaataaagctcttgcagagttacagggccttcaaaataatgtcgaagattatgtgagtgcattgagttcatggcaaaaaaatcctgtgagttcacgaaatccacatagccaggggcggataagagagctgttttctcaagcagaaagtcattttcgtaattcaatgccttcgtttgcaatttctggatacgaggttctatttctaacaacatatgcacaagctgccaacacacatttatttttactaaaagacgctcaaatttatggagaagaatggggatacgaaaaagaagatattgctgaattttataaaagacaactaaaacttacgcaagaatatactgaccattgtgtcaaatggtataatgttggattagataaattaagaggttcatcttatgaatcttgggtaaactttaaccgttatcgcagagagatgacattaacagtattagatttaattgcactatttccattgtatgatgttcggctatacccaaaagaagttaaaaccgaattaacaagagacgttttaacagatccaattgtcggagtcaacaaccttaggggctatggaacaaccttctctaatatagaaaattatattcgaaaaccacatctatttgactatctgcatagaattcaatttcacacgcggttccaaccaggatattatggaaatgactctttcaattattggtccggtaattatgtttcaactagaccaagcataggatcaaatgatataatcacatctccattctatggaaataaatccagtgaacctgtacaaaatttagaatttaatggagaaaaagtctatagagccgtagcaaatacaaatcttgcggtctggccgtccgctgtatattcaggtgttacaaaagtggaatttagccaatataatgatcaaacagatgaagcaagtacacaaacgtacgactcaaaaagaaatgttggcgcggtcagctgggattctatcgatcaattgcctccagaaacaacagatgaacctctagaaaagggatatagccatcaactcaattatgtaatgtgctttttaatgcagggtagtagaggaacaatcccagtgttaacttggacacataaaagtgtagacttttttaacatgattgattcgaaaaaaattacacaacttccgttagtaaaggcatataagttacaatctggtgcttccgttgtcgcaggtcctaggtttacaggaggagatatcattcaatgcacagaaaatggaagtgcggcaactatttacgttacaccggatgtgtcgtactctcaaaaatatcgagctagaattcattatgcttctacatctcagataacatttacactcagtttagacggggcaccatttaatcaatactatttcgataaaacgataaataaaggagacacattaacgtataattcatttaatttagcaagtttcagcacaccattcgaattatcagggaataacttacaaataggcgtcacaggattaagtgctggagataaagtttatatagacaaaattgaatttattccagtgaattaatgaggatcca

SEQ ID NO: 278 - DNA, 3543 bp, Bacillus thuringiensis
  source 1..3543: mol_type = genomic DNA
atgaatccttatcaaaataaaaatgaatatgaaacattaaatgcttcacaaaaaaaattaaatatatctaataattatacaagatatccaatagaaaatagtccaaaacaattattacaaagtacaaattataaagattggctcaatatgtgtcaacagaatcagcagtatggtggagattttgaaacttttattgatagtggtgaactcagtgcctatactattgtagttgggaccgtactgactggtttcgggttcacaacacccttaggacttgctttaataggttttggtacattaataccagttctttttccagcccaagaccaatctaacacatggagtgactttataacacaaactaaaaatattataaaaaaagaaatagcatcaacgtatataagtaatgctaataaaattttaaacaggtcgtttaatgttatcagcacttatcataatcaccttaaaacatgggagaataatccaaacccacaaaatactcaggatgtaaggacacaaatccagctagttcattaccattttcaaaatgtcattccagagcttgtaaactcttgtcctcctaatcctagtgattgcgattactataacatactagtattatctagttatgcacacgcagcaaacttacatctgactgtattaaatcaagccgtcaaatttgaagcgtatttaaaaaacaatcgacaattcgattatttagagcctttgccaacagcaattgattattatccagtattgactaaagctatagaagattacactaattattgtgtaacaacttataaaaaaggattaaatttaattaaaacgacgcctgatagtaatcttgatggaaatataaactggaacacatacaatacgtatcgaacaaaaatgactactgctgtattagatgttgttgcactctttcctatttatgatgtaggtaaatatccaataggtgtccaatctgaacttactcgagaaatttatcaggtacttaacttcgaagaaagcccctataaatattatgactttcaatatcaagaggattcacttacacgtagaccgcatttatttacttggcttgattctttgaatttttatgaaaaagcgcaaactactcctaataattttttcaccagccattataatatgtttcattacacacttgataatatatcccaaaaatctagtgtttttggaaatcacaatgtaactgataaattaaaagctcttggtttggcaacaaatatttatatttttttattaaatgtcataagcttagataataaatatctaaatgattataataatattagtaaaatggatttttttataactaatggtactagacttttggagaaagaacttacagcaggatctgggcaaataacttatgatgtaaataaaaatattttcgggttaccaattcttaaacgaagagagaatcaaggaaaccctaccctttttccaacatatgataactatagtcatattttatcatttattaaaagtcttagtatccctgcaacatataaaactcaagtgtatacgtttgcttggacacactctagtgttgatcctaaaaatacaatttatacacatttaactacccaaattccagctgtaaaagcgaattcacttgggactgcttctaaggttgttcaaggacctggtcatacaggaggggatttaattgatttcaaagatcatttcaaaattacatgtcaacactcaaattttcaacaatcgtattttataagaattcgttttgcttcaaatggaagcgcaaatactcgagctgttataaatcttagtatcccaggggtagcagaactgggtatggcactcaaccccactttttctggtacagattatacgaatttaaaatataaagattttcagtacttagaattttctaacgaggtgaaatttgctccaaatcaaaacatatctcttgtgtttaatcgttcggatgtatatacaaacacaacagtacttattgataaaattgaatttctgccaattactcgttctataagagaggatagagagaaacaaaaattagaaacagtacaacaaataattaatacattttatgcaaatcctataaaaaacactttacaatcagaacttacagattatgacatagatcaagccgcaaatcttgtggaatgtatttctgaagaattatatccaaaagaaaaaatgctgttattagatgaagttaaaaatgcgaaacaacttagtaaatctcgaaatgtacttcaaaacggggattttgaatcggctacgcttggttggacaacaagtgataatatcacaattcaagaagatgatcctatttttaaagggcattaccttcatatgtctggggcgagagacattgatggtacgatatttccgacctatatattccaaaaaattgatgaatcaaaattaaaaccgtatacacgttacctagtaaggggatttgtaggaagtagtaaagatgtagaactagtggtttcacgctatggggaagaaattgatgccatcatgcatgttccagctgatttaaactatctgtatccttctacctgtgattgtgaagcgtctaatcgttgtgagacgtccgctgtgccggctaacattgggaacacttctgatatgttgtattcatgccaatatgatacagggaaaaagcatgtcgtatgtcaggattcccatcaatttagtttcactattgatacaggggcattagatacaaatgaaaatataggggtttgggtcatgtttaaaatatcttctccagatggatacgcatcattagataatttagaagtaattgaagaagggccaatagatggggaagcactgtcacgcgtgaaacacatggagaagaaatggaacgatcaaatggaagcaaaacgttcggaaacacaacaagcatatgatgtagcgaaacaagccattgatgctttattcacaaatgtacaagatgaggctttacagtttgatacgacactcgctcaaattcagtacgctgagtatttggtacaatcgattccatatgtgtacaatgattggttgtcagatgttccaggtatgaattatgatatctatgtagagttggatgcacgagtggcacaagcgcgttatttgtatgatataagaaatattattaaaaatggtgattttacacaaggggtaatggggtggcatgtaactggaaatgcagacgtacaacaaatagatggtgtttctgtattggttctatttaattggagtgctggcgtatctcaaaatgtccatctccaccataatcatgggtatgtcttaggtgttattgccaaaaaagaaggacctggaaatgggtatgtcacgcttatggattgggaggagaatcaagaaaaattgacgtttacgtcttgtgaagaaggatatattacgaagacagtagatgtattcccagatacagatcgtgtacgaattgagataggcgagaccgaaggttcgttttatatcgaaagcattgatttaatttgcatgaacgagtga

SEQ ID NO: 279 - DNA, 1470 bp, Bacillus thuringiensis
  source 1..1470: mol_type = genomic DNA
atgtttacaagtggtgcgaaaaataggttaaagctagaaacgacagattatgaaatagatcaagtggctaatgctatagaatgtatgtcagatgaacaatattcaaaagaaaaactgatgttatgggatcaagtaaaacatgcaaaataccttagtcagtctcgaaatttgcttcaaaatggtgattttgaagatgtatttcatggatggactacaagtgatcatatgtacattcagtcggataattctacttttaaaggaaattatctgaatatatctggggcgcgagacatatacttaacgatatttccaacatacatttaccaaaaaattgatgaatcaaaattaaaaccgtatacacgttacctagtaaggggatttgtaggaagtagtaaagatgtagaactagtggtttcacgctatggaaaagaaatagatacagtcatgaatgtaccatttgatatcccgtatgtatcttctaggcctgtttgtaatgaattatatgatggtgaacaacaaccgtatccaaatgggaatgtaggatattataatccaatgtcagcttttacgccttcttacacatctgatgctcgtcagtgtatgccagggaaaaaacagatagtctgtcaagattctcatcagtttaagttccatattgatacaggtgaagtagattataatacaaatatagggatttgggtcatgtttaaaatatcttccccagatggatacgcattattagataatttagaagtaattgaagaagggccaatagatggggaagcactgtcacgcgtgaaacacatggagaagaaatggaacgatcaaatggaagcaaaacgttcggaaacacaacaagcatatgatgtagcgaaacaagccattgatgctttattcacaaatgtacaagatgaggctttacagtttgatacgacactcgctcaaattcagtacgctgagtatttggtacaatcgattccatatgtgtacaatgattggttgtcagatgttccaggtatgaattatgacatctatgtagagttggatgcacgagtggcacaagcgcgttatttgtatgatacaagaaatattattaaaaatggtgattttacacaaggggtaatggggtggcatgtaactggaaatgcagacgtacaacaaatagatggtgtttctgtattggttctatctaattggagtgctggcgtatctcaaaatgtccatctccaacataatcatgggtatgtcttacgtgttattgccaaaaaagaagggcctggaaatgggtatgtcacgcttatggattgtgaggagaatcaagaaaaattgacgtttacgtcttgtgaagaaggatatattacgaaaacagtagatgtattcccagatacagattgtgtacgaattgagataggcgaaaccgaaggttcgttttatatcgaaagcattgaattaatttgcatgaacgagtaa

SEQ ID NO: 280 - DNA, 4377 bp, Bacillus thuringiensis
  source 1..4377: mol_type = genomic DNA
atggcaattttaaatgaattatatccatctgtaccttataatgtattggcgtatacgccaccctcttttttacctgatgcgggtacacaagctacacctgctgacttaacagcttatgaacaattgttgaaaaatttagaaaaagggataaatgctggaacttattcgaaagcaatagctgatgtacttaaaggtatttttatagatgatacaataaattatcaaacatatgtaaatattggtttaagtttaattacattagctgtaccggaaattggtatttttacacctttcatcggtttgttttttgctgcattgaataaacatgatgctccacctcctcctaatgcaaaagatatatttgaggctatgaaaccagcgattcaagagatgattgatagaactttaactgcggatgagcaaacatttttaaatggggaaataagtggtttacaaaatttagcagcaagataccagtctacaatggatgatattcaaagccatggaggatttaataaggtagattctggattaattaaaaagtttacagatgaggtactatctttaaatagtttttatacagatcgtttacctgtatttattacagataatacagcggatcgaactttgttaggtcttccttattatgctatacttgcgagcatgcatcttatgttattaagagatataattactaagggtccgacatgggattctaaaattaatttcacaccagatgcaattgattcctttaaaaccgatattaaaaataatataaagctttactctaaaactatttatgacgtatttcagaagggacttgcttcatacggaacgccttctgatttagagtcctttgcaaaaaaacaaaaatatattgaaattatgacaacacattgtttagattttgcaagattgtttcctacttttgatccagatctttatccaacaggatcaggtgatataagtttacaaaaaacacgtagaattctttctccttttatccctatacgtactgcagatgggttaacattaaataatacttcaattgatacttcaaattggcctaattatgaaaatgggaatggcgcgtttccaaacccaaaagaaagaatatcaaaacaattcaaactgtatcctagttggagagcgggacagtacggtgggcttttacaaccttatttatgggcaatagaagtccaagattctgtagagactcgtttgtatgggcagcttccagctgtagatccacaggcagggcctaattatgtttccatagattcttctaatccaatcatacaaataaatatggatacttggaaaacaccaccacaaggtgcgagtgggtggaatacaaatttaatgagaggaagtgtaagcgggttaagttttttacaacgagatggtacgagacttagtgctggtatgggtggtggttttgctgatacaatatatagtctccctgcaactcattatctttcttatctctatggaactccttatcaaacttctgataactattctggtcacgttggtgcattggtaggtgtgagtacgcctcaagaggctactcttcctaatattataggtcaaccagatgaacagggaaatgtatctacaatgggatttccatttgaaaaagcttcttatggaggtacagttgttaaagaatggttaaatggtgcgaatgcgatgaagctttctcctggacaatcgataggtattcctattacaaatgtaacaaaacaaaactatcaagtgcgttgtcgttatgcaagtaatagtgataatcctgttttctttaatgtagatactggtggagcgaatccaattttccaacagataaactttgaatctactgtagatagtaatatgggagtaaaaggagaaaatggcgtctatgtagtcaaatctattgctacaactgataattcttttacagtaaaaattcctgcgaagacgattaatgttcatttaaccaaccaaggttcttctgatatctttttagatcgtattgagtttattccttttaaactaacattatctcctactccaattactttagatccgatgaagaccattacagcttctgtcttaagtgcaactagggcctctgatggcataacaaccatcaatgatccagtagatggaactctactttctttacctatgggtacttccatcgattttagtattcttaatcctactcaaactggaacatatcaagtcagtattctctacaaatcttcatccggcggttttactattactaaagtaacaaatgatcaaaacggacagatggtagattatgcttcaacctcagaactacaatatagcaaccctatttacgtcttgtctagcaatacaggaaacactgtattgaccattggacctgggggatattccggcccagatttactcataaaagaaattagattcaccccagcaactccaaattcatcaaataaaattgatacagattttcagttagttgatgggcaaggcacagtaactatttggaaaagtgataaaattgcatatacactagcagatatagatatacagatttcctttaatcaaaccgcttggcaaagtcctaatattacaccttatttaaatgatgatccagtaggtggaatagcaactttttataatactactggtgaatcccaacattttactaaagatagtctactcttccaaagaggttttaacaatattcgggttaacaatggatttggtggtgccactatttctggtcatatgaaagcaaatgtaattgataatccttcttaaaaattaaggttcattttaaaaacttcaggttacaacgtttactattttaaatttacaaactaagggggccgcgtaatggtactatcacgtatagtcaatcccattttcaccgagcaagaagatttaaataatattataacgcaaatcaatgctctattcgtttctagtacacaagataaattaaaaccaggtgtgagtgattattggatcgaggaaattgtactgaaagtggatgccttatcagatgaggtatttggaacagaaaagaaggctttacgtaaattggtgaatcaggcaaaacgtttaagtaaagcaagaaatcttctgataggcggtagttttgaaaattgggatgcatggtataaagggcaaaaagtagtaagattatcggatcacgaactgttgaagagtgatcatgtattattaccaccaccaggattgtctccatcttatattttccaaaaagtggaggaatctaaattaaaagcaaatacacgttatacggtttctggatttattgcgcatgcaacagatttagaaattgtggtttctcgttatgggcaagaaataaagaaagtggtgcaagttccttatggagaagcattcccattaacatcaagtggaccagtttgttgtatcccacattctacaagtaatggaactttaggcaatccacatttctttagttacagtattgatgtaggtgcattagatgtagacacaaaccctggtattgaattcggtcttcgtattgtaaatccaactggaatggcacgcgtaagcaatttggaaattcgtgaagatcgtccattagcagcaaatgaaatacgacaagtacaacgtgtcgcaagaaattggagaaccgagtatgagaaagaacgtgcggaagtaacaagtttaattcaacctgttatcaatcgaatcaatggattgtatgacaatggaaattggaacggttctattcgttcagatatttcgtatcataatatagacgcgattgtattaccaacgttaccaaagttacgccattggtttatgtcagatagatttagtgaacaaggagatatcatggctaaattccaaggagcattaaatcgtgcgtatgcacaactggaacaaaatacgcttctgcataatggtcattttacaaaagatgcagccaattggacggtagaaggcgatgcacatcaggtagtattagaagatggtagacgtgtattacgattgccagattggtcttcgagtgtgtctcaaacgattgaaatcgagaattttgatccagataaagaatatcaattagtatttcatgggcaaggagaaggaacggttacgttggagcatggagaagaaacaaaatatatagaaacgcatacacatcattttgcgaattttacaacttctcaacgtcaaggactcacgtttgaatcaaataaagtgacagtgaccatttcttcagaagatggagaattcttagtggataatattgcgcttgtagaagtccctatgtttaacaagaatcaaatggtcaatgaaaataaaggtgtaaatataaatagcgatacaagtatgaacaacaatcaa

SEQ ID NO: 281 - DNA, 2097 bp, synthetic construct
  source 1..2097: mol_type = other DNA
atggcaaccatcaacgagctgtacccagtgccctacaatgtactcgctcacccaatcaaggaagtagacgatccttatagttggtctaacttgctgaagggaatccaagagggctgggaggaatggggaaagacgggccagaagaagctctttgaggaccatttgacaattgcgtggaacctgtacaagaccggaaagttagattacttcgcactcactaaggcttcaatcagtctgattggcttcatcccaggagccgaggctgcagtccccttcatcaatatgtttgttgacttcgtttggccaaagttgttcggcgccaacacagaaggaaaggatcaacagctcttcaacgcaatcatggacgctgtgaataagatggtcgataacaagtttctgtcctacaacttgtccacgctcaacaaaaccatagagggcctccaaggaaacttgggcttattccagaatgccatccaggttgctatctgtcaaggatctactcccgagcgcgtcaatttcgaccagaactgcacaccatgcaatcctaaccagccatgcaaggatgacctcgatagagtggccagtcgattcgacaccgctaactcacagtttacccagcatcttcctgaattcaagaatccatggagcgatgagaactccacgcaagaattcaagagaactagcgtcgaactcacacttcctatgtacaccactgtggccacactccaccttctcttgtacgaggggtacatagagttcatgaccaaatggaacttccacaacgaacagtacctcaacaaccttaaggttgagttgcagcaactcatccactcatacagcgagactgtgaggacatcttttcttcagttcttgccaaccctcaataaccggtcaaaatctagcgtcaacgcctacaatcgttacgtgaggaacatgactgttaactgtcttgacatcgctgcaacatggccgaccttcgatactcacaattaccaccaaggtgggaagttggacctcacacggatcatcctttcagataccgccggtccaatcgaggagtacactactggagacaagacctctggtcccgagcactccaacatcactcctaacaatatcttggatacaccgtcccccacctatcagcattctttcgtcagcgtggactccattgtctattctaggaaggagctccagcaacttgatatcgctacttacagcacaaacaactccaataactgccatccttacgggttgagactctcttacaccgacggtagcagatacgattacggagacaaccagcctgatttcactacatccaataacaactattgtcacaattcttacaccgcaccgattactcttgttaacgccagacacttgtacaacgctaaaggaagcctacagaatgtggaatccctcgtggtctctacagttaacgggggtagcgggtcctgcatttgcgacgcatggattaactatttgcgtcccccacaaacctctaagaacgagtccaggcctgaccagaaaatcaacgtgctatacccaattactgagacagtgaacaagggtaccgggggcaatctgggagtaatctcggcttacgttcctatggagttggtgccagagaacgtcattggtgacgtgaacgcagacaccaagttgcctctgacacaattgaaggggttcccattcgagaagtatggtagtgaatacaataaccgtggaatctcgctcgttagagaatggatcaatggaaacaacgcagtcaagctgtccaattcgcagtccgtcgggatacagattaccaatcagactaaacagaagtacgagatccgttgccgatatgcttcaaagggggataacaatgtttacttcaacgtggacttgtctgagaacccctttcgcaatagtatttcattcgggtccacagaatcatctgtggttggcgtccaaggggagaacggcaagtacatcctcaagagtattaccactgtggagatcccagccggatcattctatgtccacattacaaaccagggctcctcagacctgttcttggataggatcgaattcgttcctaagattcagtaa

SEQ ID NO: 282 - DNA, 3393 bp, Bacillus thuringiensis
  source 1..3393: mol_type = genomic DNA
atgattcaaaaaaactatgaaattataggtgcttcaacaaacggcataaccgaattacctgaagattacaacactatagtcagcccctatgatgctccagcatccgttactacaactattgaaattactggaaccatactaagcgatttaggtgtttcaggggcatcatcagttagtttacttttgaataaacttttaaatatattatggccaaataatgccaatactgtgtgggggacattcgcaaaagagaccgctgatcttctaaatgaagtgttatctgtggatgatccagtagtaatagaagcaaatattaatttagaagggctaaaaagcacccttgatttatatttagaggcacttaaagaatggaaaaatgatccccaaaatccagcatcccaagagcgtgtcagaactagatttcgtaatgtggatgatgattttacacatgatatgccttcctttgctagagctggatatgaaacgaagctattaacagtttatgcacaagctgcaaatcttcatttacttttattaagagatgcttctatgtttggagaaggttggggaatgtctcaagtaaacataaatgataactataatcgccaattacgattgacggctcaatatacggatcatagtgtaaagtggtataacgcaggactagaaaaattaaaagggaattcaactagggaaaattggtatacttgtaatagatttcagagagaaatgacgttaatggtgttagacgtagttgcattatttccaaactacgatacacgaatgtacccgatcgcaacgtcatcagaacttacaagaatgatttatacagatccaattgcttatacacaaagcgatccatggtacaagataacatctctttctttttcaaatattgaaaacagtgcgattccaagtccatctttcttcaggtggctaaaatccatttcaattaatagccagtggtggggcagtggtcctagtcaaacctactattgggttggacatgaattggtatattctaattcaaattataatcaagcacttaaggttaaatatggagaccccaattcttatattgagccccctgattctttcagcttttcttctaaggatgtttacagaaccatctctgtcgttagaaattcaataagtaattatatagtaagtgaagttcaattcaattagtaatacacataaaattagtgagaaatttataaacatcaatcaaattgggatagaagagaaacaaaagattcaattactgaactatccttagctgctaatcccccaacaacatttggaaatgtagcagaatacagtcatagattagcatatatttcagaggcataccaaagtcacaacccatcaaaatacccaacctacatacctgtattcggttggacgcacacaagcgtacgttacgataataaaatttttccggaaaaaatcactcaaattccagctgttaaaagcccttcagctgaaggttgatcatggcaaaatatagtaaaaggtcccgggtttactgaaggagatgtgacaactgctgtttcgccagcaactgtaaccgacataataaaaatacacgttactctagatccaaattcactttcacaaaaatatcgtgcatgacttcgctatgcttccaatgcatttgtagcagctacattgtatacaaatacaagtagtaattataattttgaacttacagaaagtacaactgaacagtttacaacatataattcatacaagtatgtagatattccaggttcaatacaatttaataatacttctgatacagtgtctgtttatttgcatatggattcaacaactaatgcaaccgttcatgtagatagaattgaattcattccagtagatgaaaattacgataacagagtaagactagaaaaagcacagaaatctgtgactgccttgtttacagcgggaagaaatgcactccaaacggatgtgacagattttaatgtagatcaggtttcaattttagttgattgtataccacgggcattatatcctaatgagaaacgcgaactactaagtttagtcaaatatgcaaaacgtttgagctattcccgtaatttcctcctagatccaacattcaattctatcaattcatcagatgagaatggctggtacggaagtaatggtattgcaattggcagtgggaatattttattcaaagggaactatttaattttctcaggtgccaatgatgaacagtatccaacctatctctatcaaaaaatagacgaatctaagttaaaagaatatacacattataaactgacaggttttatcgagagtagtcaggatttagaagcatacgtgattcgttatgatgcaaaacatcaaacaatggatgtatccaataatctattctcagatattactcctgtaaatgcatgcggagaaccaaatcgttgtgcggcactaccatacctggatgaaaatccaagattagaatgtagttcgatacaagatggtattttatctgattcgcattcgttttctctccatatagatacaggttcaattgatttcaatgagaacgtaggaatttgggtgttgtttaaaatttctacacctgaaggatatgcgagatttggaaacctagaagtgattgaagatggcccagtcattggagaagcattagcccgtgtgaaacgccaagaaacgaagtggagaaacaagttaacacaactgcgaacggaaacacaagcgatttatacacgagcaaaacaagccattgataatttattcacaaatgcacaggactctcacttaaaaataggtgctacatttgcgtcaattgtggctgcaagaaagattgtccaatccatacgtgaagcgtaaatgtcatggttatctatcgtcccaggtgtaaattatcccatttttacagaattgaatgagagagtacagcaagcatttcaattacatgatgtacgaaatgtcgtgtgtaatggccgattccttaatggaacatctgattggattataacctctgacgtaaaggtacaagaagaaaatgggaataacgtattagttctttccaattgggatgcgcaagtattatacaatgcatgaagctctatcaataccacggatatatcttgcgtgtaacggcacgtaaagaaggattgggagaaggatatattacaattacggatgaagaagggcatacagatcaattgacatttggtgcatgtgaggagatagatgcatcctaacacgttcgtatccacaggttatatgacaaaagaactagaatttttcccagatacagagaaggtgcgtatagaaattggagaaacagaagaaatattccaggtggaaagtgtagaattatttttgatgaaagatctatgttaa

SEQ ID NO: 283 - DNA, 3525 bp, Bacillus thuringiensis
  source 1..3525: mol_type = genomic DNA
atgagtccaaataatcaaaatgaatatgaaattctagatgcttcatcatctacttctgtatccgatagttctgttagataccctttagcaaacgatcaaacgaccacattacaaaacatgaactataaagattgtctgagaatgtctgagggagagaatcctgaattatttggaaatccggagacgtttattagttcatctacggttcaaactggaattggcattgttggtcaagtactgggggctttaggggttccatttgctggacagatagctagtttttatagtttcattgtcggtcaattatggccatcaagtaccgtgagtgtatgggaaatgattatgaaacaagtggaagatctaattgatcaaaaaataacagattctgtaaggaaaacagcgcttgcaggactacaaggattaggagatggcttagacgtatatcagaaatcacttaagaattggctggaaaatcgtaatgatacaagagctagaagtgttgtggtgacccaatatatagctttagagcttgattttgttgctaaaatcccatcttttgcaatatctggacaggaagtaccattattatcagtgtatgcacaagcagcgaatttacatttgctattattacgagatgcttccatttttggagcagagtggggattcacaccaggagaaatttccacattttatgatcgtcaggtgacacgtaccgcccaatactcggattattgtgtaaagtggtataacactggcttagataaattaaaaggtacgaatgctgcaagttggctgaagtatcaccaattccgaagagaaatgacattactggtattagatttagtagcgttatttccaaactatgacacacgtacgtatccaatcgaaacaacggcccaacttacacgggaagtgtatacagatccaatagtatttaacagagaaacaagtggtggattttgtaggcgttggtcacttaacagtgatatttctttttcagaagtcgaaagcgctgtaattcgttcaccacacctatttgatatactcagtgaaatagaattttatacaacaagagcggggcttcccttgaataatacggaataccttgaatattgggtaggacattctataaaatataaaaatacgaatgcctcatcagcattagaacgtaattacggtacgattacttctaacaaaatcaagtattatgatttagcaaataaggatatctttcaggttcgatcattaggggcggatttagctaattactacgcacaggtatatggagttccgtacgctagttttacactgcttgacaagaatacaggatcaggatcagttggaggttttacgtactcaaaaccacatacaactatgcaagtatgtacacaaaattacaatacgattgatgaaatccctccagagaatgagccacttagtagagggtatagccatagattatctcatatcacctcttattctttttctaagattgctagtagtcctgctagatatggcaatctccctgtatttgcttggacacatcggagtgcggatgttacaaatacagtttattcagataaaattactcaaattccagttgtaaaagggatcgacctcgggagcacaagtacgattgtaaattttgaatacaatggaggaagtatagtcaaagatactaaatcatcaactcataataactctctttcacgaatagtgagtttaatgataaaaaccgaggatccaaatccaaattcccgctctttatatcgtattagggttaagtatgctgctgatgtgcctggaactttccgactgcatattcaaaatacttccccggttacagtaccctttactgcgacgatgagcggtactaatttacaatacagttcctttaaatatatagaatatataggttactttaataatagagaagttggtttttctattgagtcaagtacatcacagggtagaacacgtaatgtatatatcgacaaaatcgaattcatcccggtagatgcgacatatatagcagaagaagacctagaggtggcaaagaaagctgtgaatggcttgtttacgaatacaaaagatgccttacagacaagtgtaacggattatcaagtgaatcaagcggcaaacttagtagaatgcctatccgatgagttatacccaaatgaaaaacgaatgttatgggatgcagtgaaagaggcgaaacgacttgttcaggcacgtaacttactccaagatacaggctttaataggattaatagagaaaacggatggacgggaagtacgggaattgagattgtggaaggagatgttctgtttaaagatcgttcgcttcgtttgacaagtgcgagagagattgatacagaaacatatccaacgtatctctatcaacaaatagatgaatcacttttaaaaccatatacaagatataaactaaaaggttttataggaagtagtcaagatttagagattaaattaatacgtcatcgggcaaatcaaatcgtcaaaaatgtaccagataatctcttgccagatgtactccctgtcaattcttgtggtgggatcgatcgctgcagtgagcaacagtatgtagacgcgaatttagcactcgaaaacaatggagaaaatggaaatatgtcttctgattcccatgcattttctttccatattgatacaggtgaaatagatttgaatgaaaatacaggaatttgggtcgtatttaaaattccgacaacaaatggatacgcaacactaggaaattttgaattggtagaagaggggccattgtcaggggaaacattagaacgagcacaacaacaagaacaacaatggcaagacaaaatggcaagaaaacgtggggcatcagaaaaagcatattatgcagcaaagcaagccattgatcgtttattcgcagattatcaagaccaaaaacttaattctggtgtagaaatgtcagatatgttggcagcccaaaaccttgtacagtccattccttacgtatataatgatgcgttaccagaaatccctggaatgaactatacgagttttacagagttaacaaatagactccaacaagcatggaatttgtatgatcttcgaaatgctataccaaatggagattttcgaaatggattaagtgattggaatgcaacatcagatgtgaatgtgcaacaactaagcgatacatctgtccttgtcattccaaactggaattctcaagtgtcacaacaatttacagttcaaccgaattatagatatgtgttacgtgtcacagcgagaaaagagggagtaggagacggatatgtgatcatccgtgatggtgcgaatcagacagaaacactcacatttaatatatgtgatgatgatacaggtgttttatctgctgatcaaactagctatatcacaaaaacagtggaattcactccatctacagagcaagtttggattgacatgagtgagaccgaaggtgtattcaacatagaaagtgtagaactcgtgttagaagaagagtaa

SEQ ID NO: 284 - DNA, 3525 bp, Bacillus thuringiensis
  source 1..3525: mol_type = genomic DNA
atgagtccaaataatcaaaatgaatatgaaattatagatatggcaccttctacatctgtaaccaatgattctaacagatacccttttgcgaatgagcccacaaatgcattacaaaatatgaattataaggattatttaagaatgtctgagggatattctcctgaatatttaacaagcctaagtccttacagccagtttggcacagttgataagatcatcagtattattagtctattgaatagtgctgcaggtattcctggtcttgatttttttactggattgctgcaatttattcttgacttctttgcaccagaggatccgtgggcagagttaatggaactagtggaacaactcatagatcaaaaaataacagttgctacaagagaaaaggcgctcgcagaattaagaggactgataaatggataccttgtatatcagcaatcattagaaagttggctggaaaatccaaatgctacaagagctagtatagttcgagaacaatatgtcgctttagaacttgattttgttacttcgatttcatcttttgcgatagctggacaggaagtaccgttattagccgtgtacgcacaagctgctaatttacatttgttattattgagagatgtgtcaatatttggagaagaatggggattaacagtaaatgaggttaataccttctatattcgtcaaatgacttatacaactgagtatagtgattattgtgtaagaatttataatactggcttaaataaattaaaaggatctagtgcatctagttgggttgattataatcgctttcgtagagaaatgaacttactagtactagatattattgcgttatttccaaactatgatgttcgtaggtatccaatggaaacaacaacggaattaacaagagtagtttacactgatccaattgtgtttgacgaaaggaagggggtggcgtcgactcatagttggacggcgattgcaccatctttctcaagtatagaatctctaactcgacgaccaggattatttacatggttagatcaactaactattttttcgaaacgcatatcgcaacctagtgtatttataaatagttgggcggggcataagattagcacctttagaacacaaaaaacagatatactcataaataccacccatggagatactaataatcctataaaagaatttgtagtagataccaaaaaagtagaagatatttatcaaacgatagcatacccacatgcagtagcaaatgaagtattctatttattcggtgtcccaaaagttgattttaatatggtacctgcaggtggctctgcaaactctgcacacaccctcattttttctgatagtacgggagggagactggaaagtattacgaagaactcagaagcagaattacctccaacagagtcattatcagatacacctcaaccaaaccaagtaacttattctcacagattagattatgctacaataattaaagcaaataaaagttatggaagtgggtatattccattattaggttggacccatcggagtgtagatcgtaataatacaatttatccgaataaaatcactcaaataccagcagtaaaagctttctcatatactgaatcatttaatgtaaatgttattgcaggtccaggattcacaggaggagatttaataagtttaggtcatttagagaatatttatatgaaattaaacgttccaaatcctcaaaaattccgtgttcgtattcgttatgctgctagtacaacttcgtatttgcaaataactgggctatctaatttagctcagtctgatcgtttcgaacagacgtattctaatgaaaatgaaaacaatttgatgtttgaaaattttcaatatgtagaacttagaaatattttttcggtagatgctccattagaaaatcatcaagtaagtatacaaaattatcaaggtaatggttttgttattatagaccgaatcgaattcatcccagtaaatgcaacatatgaggcagaacaagatttagattcggcaaagaaagcagtgaataccttgtttacgaatacaaaagatggtttacgaccaggggtaacggattatgaagtgaatcaagcggcaaacttagtggaatgcctatcggatgatttgtatccaaatgaaaaacgcttgttatttgatgcagtgaaagaggcaaaacgactcagcgaggcacgtaacttactacaagatccagatttccaagagataaatggagaaaatggatggaccgcaagtacaggaattgaggttgtagaaggagatgctctatttaaagggcgttatctacgcctaccaggtgcgagagaaatggatacagaaacgtatccaacgtatctgtatcaaaaagtagaggaaggtgtattaaaaccatacacaagatatagattgagagggtttgtcggaagcagtcaaggcttggaaatttccacaattcgtcatcagacgaaccgaattgtaaaaaatgttccagatgatttattaccagatgtacctcctgtaaactctgatggtagaatcaatcgatgcagcgaacaaaagtatgtgaatagccgtttagaaggagaaagaggattaccaaatgggaatcgttctgctgaagcgcatgaattctctctccctattgatataggagagctggattacaatgaaaatgcaggaatatgggttggatttaagattacggacccagagggatatgcaacactcggtaaccttgaattggtagaagagggaccattgtcaggagacgcactagaacgcctgcaaagagaagaacaacagtggaagcttcaaatgacaaaaagacgtgaagagacggatagaaaatatacggcagcaaaacaagcggtagatcgtttatatgcagattaccaagatcaacaattgaatccaaacgtagaaattacggatattactgcggcccaaaacctgatacagtccattccttatgtatataatgaaatgttcccagaaatacaagggatgaactatacgaagtacacagagaaaacaaatcgactccaacaagcgtggggtttgtatgatcaacgaaacgccataccaaatggtgatttccgaaatgaattaagtaattggaatacaacatctggtgtaaatgtacaacaaatcaacaatacgtctgtcttagtcatgccaaactgggatgggcaagtttcgcaacagtttacagttcaaccgaatcaaagatatgtattacgagttactgcaagaaaagaaggggtagggaatgggtatgtgactatccgtgatggtggaaatcaaacagaaacgcttacgtttagtgcaagcgattataacacagatagtgtgtataatacgcaagtgtcgaatacaaatgggttgtacaatgagcaaacaggatataccacaaaaacagtgacattcatcccatatacagatcaagtgtggattgagatgagcgagaccgaaggtatgttctatatagaaagtgtcgaattgattgttgacgtagagtaa

SEQ ID NO: 285 - DNA, 3474 bp, Bacillus thuringiensis
  source 1..3474: mol_type = genomic DNA
atgagtccaaataatcaaaatgagtatgaaattatagatgcgtcatcacctacttctgtatctaataactcagtgaaataccctttagcaagtgatcaaacgaccacattacaaaatatgaactataaagattatctgagaatgtctgagggagagaatcctgaattatttggaaatccagagacgtttattagtgcgcaggatgcggttggaactgggattgatattgtgagtaaactactaggtagtttaggggttccacttgttgggcaagccgcaacggcacttaaatggattataggtaaattgtggccttcttcaggaaacccgtgggatgatttgatgacggcagtagaagaactcataaatcaaaaaatagaagcatatgcaagaagtaaggcacttgctgaattgggtgtttcgggaagagctgtaaaatcctatcaaaccgcacttgaagagtggcaaaaaaacccgaataacgcgcgaagcgcagcacttgtaagggaaagattttcagatgcagaacatacattgcgtactcaaatgagtttatttaccgttcgtggttatgaaattccgcttttagcaacatatgcacaagctgccaatttgcatttgtttgtaatgaaggatattcaaatttacgggagagaatggggatatactcagggagatattaaccttttctatcgagaacaagtagaatttacaggggaatactctgattattgtgttaagtggtacaatgctggcttagataaattaagaggctcgactgctctacaatggattaactataatcgtttccgcagagaaatgacagtgatggcactggatatagttgcattattcccaaattatgacatacgcatgtatccaatgaaaacaaccgcagaattaacgcgaagaatttatacagatccgcttggttatacgggaagtgggtctaacacgccaccatggtataattatggatattctttctcatggatagaaaataatgccatgccagcacctggattgttccagtggttacaaggaattgggatttatactaaatttgctcgtataactccattttatgcgaactattggtcaggacatactgtattttataaatttactaacgattctactgagagacgtgttcagtatggagatacagatactccagaattagatagttcttcctttgaaaatgttgacatttataaggtttcagcatcagttggttcgtacaaaagtaataccgtactattaccaacttttaaagctacttttgagggggtaaatcaaaataatcagttaaagacctttaggtatcaaaaagaatctaatgtcccaagtcaaacgaaaaactcaaccacagagctgcctgttcagttatcaactccgcctacttacggagattctgaacagtacagtcatagactagcctatgtttttgatgccccaatcgattcatatacaggcatatatcgcatgtatggatttgcccctattcttggttggacacatattagtgtaagtcgtgacaataggattgatccagataaaattactcaaattccagctgtaaaggcatatgctgagggtcttgctaattatatcaaagatccggggtttacaggaggagatttattagctttaggtagaaactcaaatacttcattgattgttaatttttcgaagcctcaaacataccgtattcgtattcgttatgctgctagtaaaacttcgtattttcaactacgtgggctgcataatatagctcagtctcagcgtttcgaagcgacgtattctaataaaaatgaaaacgatttgacatttaacgattttaaatatgtagaaattcaaaaaactgtttcaatagacaatccatcagaaagtcgtagtataagtatatacactcaatcagatacagaattacttattatagacaaaatcgaattcatcccagtagatgcaacatttgaagcggaacaagacctagatgtggcaaagaaagcggtgaatggcttgtttacgaatacaaaagatgccttacagacaagtgtaacggattatcaagtcaatcaagcggcaaacttagtagaatgcctatccgatgagttatacccaaatgaaaaacgcatgttatgggatgcagtgaaagaggcgaaacgacttgttcaggcacgtaacttactccaagatacaggctttaatgtaataaatggagaaaacggatggacgggaagtacgggaattgaggttgtggaaggagatgttctgtttaaagatcgttcgcttcgtttgccaagtgcgagagagattgatacagaaacatatccaacgtatctctatcaacaaatagatgaatcgcttttaaaaccatatacaagatatagactaagaggttttataggaagtagtcaagatttagagattaaattaatacgtcatcgggcaaatcaaattgtcaaaaatgtaccggataacctcttgccagatgtacgccctgtcaattcttgtggtggagtcgatcgctgcagtgaacaacagtatgtagacgcgaatttagcactcgaaaacaatggagaaaatagaaatatgtcttctgattcccatgcattttctttccatatggatacaggtgaaatagatttaaatgaaaatacaggtatttgggtcgtatttaaaattccgacaacaaatggatacgcaacattaggaaaccttgaattggtagaagaggggccattatcaggagacgcactagaacgcttgcaaagagaagaacagcagtggaagcttcaaagaaccaaaagacgtgaagagacggatagaaaatatatggcagcaaaacaagccattgatcgtttattcgcagattatcaagaccaacaactcaattctggtgtagaaatgtcagatttgcttgcagctcaaaaccttgtacagtccattccttatgtgtataacgaaatgttcccagaaatccctggaatgaactatacaaatttcacagagttaacaaacagactccaacaagcatggaatttgtatgatcttcgaaatgctataccaaatggagattttcgaaatggattaagtgattggaatgcaacatcagatataaatgtgcaacaactaaacgatacatctgtccttgtcattccaaactggaattctcaagtgtcacaacaatttacagttcaaccgaattatagatatgtattacgtgtcacagcgagaaaagagggagcaggagacggatatgtgatcatccgtgatggtacaaatcagacagaaacactcgcatttaatacatgtgataatgatgcaggtgttttatctactaatcaagctagctatatcacaaaaacagtggaattcacaccatctacagagcaagtttggattgacatgagtgagaccgaaggtgtattcaacatagaaagtgtagaactcgtgttagaagaagagtaa

SEQ ID NO: 286 - DNA, 2094 bp, Bacillus thuringiensis
  source 1..2094: mol_type = genomic DNA
atgaatccatatcagaataagaatgaatatgaaatattggatagttcacaaaataactttaatatgtctattaatcatttacaatatccattaaaaaatagtccatatcctcaattttctatagacaattgtaggcgtagtaatactgctacttgggttaataatattggggatgcagttagtgaatcaatatctttggtgtcaacaatattggggatttttacagaacctaatttgtggggagtattttctgcattaattggtcttctagataggatgagaggtgctctgggaacaccttctatagctgcattatctatatgtgatttgctagaaattattgatgaacgagtaaatcggagtgttttgaatgacggaatcgctgattttaatggttcattagctctatttggaaatttcttgtccgcattaaattcctggagaaataatccaaacaatagtactgctgatgagcttcgttttcgttttagagcatctgattcagaatttgataggagtttaacaaatggatctttaacacatggtggttcattagctagacaggatgcacaaatattattattaccttcttttgcaaaagctgcatattttcacttatttttattaaatgaggctattacaagtggatctaattggggtctggagattaggcctactataaattatcaagaaaaattagaaaatagtattagaaattacaccaattattgtgtacattggtacaatcagggtttagaggaaatacgccgccggaataatagtggtgaaaattggttagtatttcacagattccgtagagatatgacattgcaagtattagatctagtagcaacatttccgaattttgatactaatcgatattctacttcaatgccaataactactcaattaagtagggtgatttatacagatccaatcggttgtgtaagtcaatcccatctaaatagtaattggtttggcccagtaaatggtactaattttacaagtttagaaaatgaaattcctagtcctaccctttctcaatttttaaattctatagatttagttgatcagccgcttagatggggtgttggaactaatggaggaaatacatggcaaggaaatacaaatagttttaatttttcctcttcatctactgttttccatgaaagttatggaagacgaactggtcagaatattatccgtgggctgaatggtagggatgtttttagaatagattcgagacctatttctctagatggtcatacattcggagttaatagagtagaatttcatcatactactagttctcaaaactctatatatacaggatatttgagaacatccggacttaatagaccagtggttcagaatgtccggacgtttttaccaggagaaaattctgatataccaaatcgagaagattatactcatagattaagtagggtagcaaatataacaggtgggcttcgacatgtagcagttcgtgaggatcaaagttcttctttattgttatatggctggacacataaaagcttaactcgtgaaaatatgtataatcttaatgaaatttttcaaatacctgctgtaaaaacaatgaacacacctggtattcaagtaattgcaggacctggatctacaggtggggatttattaagactaaatcttggtgctagagtaacttataattgtagacctgctcgtccattagaaacaccaatggtagtacatgtacgtgttcgttatgctagtgtaggaagttctacaataagaatagagtttactgatccatctggttcatttaatccacaaacacttgctttacctgatacaaattcatcattaaataatcttcaatatcaaaatttcaacatggttaccactaatttcgcacgtggtacgagtataatgcaaggtaatttttcaataagtattataaatatgaatggagctaatttagctttagataaaattgaaattataccggttcgtattggtcgaaacacctcagaacaagtaaaagaatttattgataaactgggttgtgttgcaaagtttgaaaaatatagttatagtttaagcggttctgaataa

SEQ ID NO: 287 - DNA, 2028 bp, Bacillus thuringiensis
  source 1..2028: mol_type = genomic DNA
atgaatccatatcaaaataagaatgaatatgaaatattcaatgctccatccaatggttttagcaagtctaataactattctagatatccattagcaaataagccaaatcaaccactgaaaaacacgaattacaaagattggctcaatgtgtgtcaagataatcaacaatatggcaataatgcggggaattttgctagttctgaaactattgttggagttagtgcaggtattattgtagtaggaactatgttaggagcttttgctgcccctgtcttagctgcaggtataatatcttttgggactttgttgccgatcttttggcaaggatctgaccctgcaaatgtttggcaggatttgttaaacatcggaggaaggcctatacaagaaatagataaaaacataattaatgtactaacttctatcgtaacacctataaaaaatcaacttgataaatatcaagaatttttcgataaatgggagccagcacgtacacacgctaatgctaaagcagtacatgatctctttactaccttagaacctataatagataaagatttagatatgttaaaaaataatgctagctatcgaataccaacactccctgcatatgcacaaatagctacttggcacttgaatttattaaaacatgctgctacctattacaatatatggctgcaaaatcaaggtataaatccaagtactttcaattcatctaattactatcagggctatttaaaacgtaaaatacaagaatatactgactattgtatacaaacgtacaatgcaggactaactatgattagaactaatactaacgcaacatggaatatgtataatacttaccgtttagaaatgactctaactgtgttagatcttattgctatttttccaaattatgacccagaaaaatatccaataggagttaaatctgaacttatcagagaagtttatacgaatgttaattcagatacatttagaaccataacagaactagaaaatggattaactagaaatcctacattatttacttggataaaccaagggcgtttttacacaagaaattctcgagacattcttgatccttatgatattttttcttttacaggtaaccagatggcctttacacatactaatgatgatcgcaacataatctggggagcggttcatggaaatattatttctcaagacacatccaaagtatttcctttttatagaaacaaacctattgataaggtcgaaattgtcagacatagagagtactcagatataatatatgaaatgatatttttttcgaatagcagtgaagtatttcgatattcatccaattcaacaatagaaaataattataaaagaactgattcttatatgattccaaaacaaacatggaaaaataaagaatatggtcatactctatcgtatataaaaactgataattatatattttcagtagttagagaaagaagaagagttgcatttagttggacacatactagtgttgatttccaaaatacaatagatttagataacatcacccaaatccacgctctaaaagctttgaaggtaagttctgattcgaaaattgtgaaaggtcctggtcacacaggtggagacttggtaattcttaaagatagtatggattttagagttagatttttaaaaaatgtttctcgacaatatcaagtacgtattcgttatgctactaatgctccaaagacaacagtattcttaaccggaatagatactataagtgtggagctccctagtaccacttcccgccaaaacccaaatgctacagatttaacatatgcagattttggatatgtaacatttccaagaacagttccaaataaaacatttgaaggagaagacactttattaatgaccttatatggtacaccaaatcattcatataatatatatattgacaaaatcgaatttattccaatcactcaatctgtattagattatacagagaagcaaaatatagaaaaaacacagaaaatagtgaatgatttatttgttaattaa

SEQ ID NO: 288 - DNA, 1941 bp, Bacillus thuringiensis
  source 1..1941: mol_type = genomic DNA
atgaattatatggaagatagttctttagatactttaagtatagttaatgaaacagactttccattatataataattataccgaacctactattgcgccagcattaatagcagtagctcccatcgcacaatatcttgcaacagctatagggaaatgggcggcaaaggcagcattttcaaaagtactatcacttatattcccaggttctcaacctgctactatggaaaaagttcgtacagaagtggaaacacttataaatcaaaaattaagccaagatcgagtcaatatattaaacgcagaatatagggggattattgaggttagtgatgtatttgatgcgtatattaaacaaccaggttttacccctgcaacagccaagggttattttctaaatctaagtggtgctataatacaacgattacctcaatttgaggttcaaacatatgaaggagtatctatagcactttttactcaaatgtgtacacttcatttaactttattaaaagacggaatcctagcagggagtgcatggggatttactcaagctgatgtagattcatttataaaattatttaatcaaaaagtattagattacaggaccagattaatgagaatgtacacagaagagttcggaagattgtgtaaagtcagtcttaaagatggattgacgttccggaatatgtgtaatttatatgtgtttccatttgctgaagcctggtctttaatgagatatgaaggattaaaattacaaagctctctatcattatgggattatgttggtgtctcaattcctgtaaattataatgaatggggaggactagtttataagttattaatgggggaagttaatcaaagattaacaactgttaaatttaattattctttcactaatgaaccagctgatataccagcaagagaaaatattcgtggcgtccatcctatatacgatcctagttctgggcttacaggatggataggaaacggaagaacaaacaattttaattttgctgataacaatggcaatgaaattatggaagttagaacacaaactttttatcaaaatccaaataatgagcctatagcgcctagagatattataaatcaaattttaactgcgccagcaccagcagacctattttttaaaaatgcagatataaatgtaaagttcacacagtggtttcagtctactctatatgggtggaacattaaactcggtacacaaacggttttaagtagtagaaccggaacaataccaccaaattatttagcatatgatggatattatattcgtgctatttcagcttgcccaagaggagtctcacttgcatataatcacgatcttacaacactaacatataatagaatagagtatgattcacctactacagaaaatattattgtagggtttgcaccagataatactaaggacttttattctaaaaaatctcactatttaagtgaaacgaatgatagttatgtaattcctgctctgcaatttgctgaagtttcagatagatcatttttagaagatacgccagatcaagcaacagacggcagtattaaatttgcacgtactttcattagtaatgaagctaagtactctattagactaaacaccgggtttaatacggcaactagatataaattaattatcagggtaagagtaccttatcgcttacctgctggaatacgggtacaatctcagaattcgggaaataatagaatgctaggcagttttactgcaaatgctaatccagaatgggtggattttgtcacagatgcatttacatttaacgatttagggattacaacttcaagtacaaatgctttatttagtatttcttcagatagtttaaattctggagaagagtggtatttatcgcagttgtttttagtaaaagaatcggcctttacgacgcaaattaatccgttactaaagtag

SEQ ID NO: 289 - DNA, 1941 bp, Bacillus thuringiensis
  source 1..1941: mol_type = genomic DNA
atgcaaaataacaactttaataccacagaaattaataatatgattaatttccctatgtataatggtagattagaaccttctctagctccagcattaatagcagtagctccaattgctaaatatttagcaacagctcttgctaaatgggctgtaaaacaagggtttgcaaaattaaaatccgagatattccccggtaatacgcctgctactatggataaggttcgtattggggtacaaacacttttagaccaaagattacaagatgacagagttaagattttagaaggtgaatacaaaggaattattgaggtgagtaaagtttttactgattatgttaatcaatctaaatttgagactggaacagctaataggcttttttttgatacaagtaaccaattaataagcagattgcctcaatttgagattgcaggatatgaaggagtatccttttcactttttactcagatgtgtacatttcatttgggtttattaaaagatggaattttagcaggaagcgattggggatttgctcctgcagataaagacgctcttatttgccaattcaatagatttgtcaatgaatataatactcgactgatggtattgtactcaaaagaatttggacggttattagcaaaaaatcttaatgaagccttgaactttagaaatatgtgtagtttatatgtctttcctttttctgaagcatggtctttattaaggtatgaaggaacaaaattagaaaacacgctttcattatggaattttgtgggtgaaagtatcaataatatatctcctaatgattggaaaggtgcgctttataaattgttaatgggagcacctaatcaaagattaaacaatgttaagtttaattatagttatttttctgatactcaagcgacaatacatcgtgaaaacattcatggtggcctgccaacatataatggaggaccaacaattacaggatggatagggaatgggcgtttcagcggacttagttttccttgtagttatgaattagaaattacaaaaataaaacaggaaataacttacaatgataaagggggaaatttcaattcaatagttcctgctgctacgcgcaatgaaattctaactgctaccgttccaacatcagctgatccattttttaaaaccgctgatattaactggaaatatttctctccgggtcttttctctggatggaatattaaatttgatgatacagtcactttaaaaagtagagtaccaagtattataccttcaaatatattaaagtatgatgattattattttcgtgccgtttcagcctgtccaaaaggcgtatcacttgcatataaccatgattttttaacgttaacatataataaattagaatatgatgcacctactacacaaaatatcattgtaggattttcaccagataatactaagagtttttataggagcaactctcattatctaagtacaacagatgatgcctatgtaattcctgctttacaattttctacagtctcagatagatcattcttagaagatacaccagatcaagcaacagatggcagtattaaatttacggatactgttcttgggaatgaggcaaaatattctattagactaaatactggatttaatacagctactaggtatagattaattatacgttttaaagcgcgtgctcgtttggctgctggtatacgtgtacgttctcaaaattcagggaataataagttattaggtggtattcctgtagagggtaattctggatgggtagattatattacagattcatttacttttgatgaccttgggattacaacttcaagtacaaatgctttctttagtattgattcagatggtgtaaatgcttctcaacaatggtatttgtctaaattaattttagtaaaagaatccagttttacgactcagattccattaaaaccatag

SEQ ID NO: 290 - DNA, 4391 bp, Bacillus thuringiensis
  source 1..4391: mol_type = genomic DNA
gaaaattcgagaattaatcagacatgcaggcgccaaaaacgtagtattggatggcagagatggagtaatgaatatctctatggtgtactagggctctattgggactggaaagttcgtccccttgaaagctcaggaagatattgataaaagtgtctgccatttgataggtctcataacccttttgatgaagtttatggggtgagctgcttgagggaaaacctcacgagcagttcttatggggaggggctggaaacgggttataactgataccgcgccagtcctttacccgacaacgaacttttgcttggttagaaaattaccgcaggctttggaaaaactgtgaacgaacacttgaaaatagcagacaaagttgcttattggcagctgtggctattttattaaaaagattccaaacaggttctcagaaaatagttgtaattcatcttgaatcgaaagattcataaaaaacgtcatcctttctagctttttagaaagaataacgttttttgacacttgggggtagtcttatttcttaagttgatgggcatgcaacagaaccctaaaaaatcaataattcaacaaaaataatggggatatttgttgaattattgcaacaggaatacatacgtagattgcgaatatttagaagtacaccctacatattattggttaggtggaatgaattataaaaaatgatgggaataagggaggaacgaagatgcattattatgggaataggaatgaatatgacatattaaatgcttcatcaaacgattcaaacatgtctaatacttatccgaggtatccgttagcaaatccacaacaagatttaatgcaaaatacaaattataaagattggcttaatgtatgtgaagggtatcatatagaaaatcctagagaagcaagcgttagagctggacttggtaagggattaggtatagttagtacaatcgtagggttctttggtggttctattatcttagatacaattggattgttttaccaaatttcagagctactttggccagaggatgatacccagcaatacacttggcaagatattatgaatcatgtagaagatcttatagacaaacgaataactgaggttatacgaggaaatgcaattagaacattagcagatttacagggtaaagttgatgattataacaattggttgaagaaatggaaagacgatccaaaatctacaggtaatttaagcaccttagtaaccaagtttacggctcttgattcagattttaatggtgctataaggacagttaataatcaggggagtccaggttatgagttacttttattgcctgtctatgcacaaattgcgaatctgcatttacttttattacgggatgctcagatttatggagataaatggtggagcgcacgagctaatgctcgtgataattattaccaaatacaattagagaaaacaaaggaatatacagaatattgtataaattggtataataagggtttaaatgattttagaacagcaggtcaatgggtaaactttaatcgttatcgtagagaaatgactcttactgtattagatattatttcaatgttccctatttatgacgcgagattatatcctacagaagtaaaaaccgaactaactagggaaatttattcagatgttattaatggggagatatatggacttatgactccttatttttcttttgagaaagctgaatcactttatacaagggcaccccatctcttcacttggctaaaaggatttcgatttgtaaccaattctatttcttattggacatttttatcaggtggtcaaaataagtattcttatactaataattctagtattaacgagggctcttttaggggacaggacacagattatggtgggacttcttctaccattaatattccatcaaattcgtatgtatataatttatggacggaaaattatgaatatatttatccttggggtgatcctgtaaatattacaaaaatgaatttttctgtaacagataataattcttcaaaagaattaatttatggtgcacacagaacgaataaacctgttgttcggacagattttgattttctcactaataaagagggaactgagttagcaaaatataatgattataatcatattttatcctatatgttaattaatggggaaacgtttggtcagaaacgtcatggttattcgtttgcttttacacatagtagtgttgatcctaataataccattgcagcgaataaaattacgcaaattcctgtagtgaaagcttcgagtataaatggatcgatttcaattgaaaaaggtcccggatttacgggaggagatttggtaaagatgagagcagattcaggtttaactatgcgttttaaagctgaattattagataaaaaatatcgtgttcgaatacgttataaatgtaactacagttctaaattaatactacgaaaatggaaaggggaaggttatatacaacaacaaattcacaatatttctcccacatatggagccttttcttatttagagtcttttactataactacgacagaaaatatatttgatttgacaatggaggtaacatatccgtatggtagacagtttgttgaagatataccatctcttatattagataaaatcgaattcctcccaactaactgataccattcacaggaaatatgaggaaaaatatgaattagaaagatcacaggaaacatttaatagtatatttgttgattaaaacaaagtactaacgtagatggtatagctgtttgaaaaaataagaaaaaaggttgtgaattttatgcttacaagtggtgcgaaaaatatgttaaaactcgaaacgacagattatgaaatagatcaaatggcgaatgctatagaaaatatgtcaggtgaacaatattcacaggaaaaaatgatgcaatggcatgacataaaatatgccaaacaattgagtcaagcacgtaatttacttcaaaatggtgattttgaggatttatttagtggatggactacaagtaatcagatgtccattcaggcagataatgcaacttttaaagggaactatctgcatatgtctggggcgagagacatatatggaacgatattcccaacgtatatataccaaaaaattgatgaatccaaattaaaaccgtatacgcgttatctagtcaggggatttgtgggaagtagtaaagatctagaattaatggtaatgcgttatggaaaagaaattgatacagtaatgaatgtaccaaatgacataccgtacgtaccttctatgccggtctgtaacgaattatatgatggtcaacaaccgtatccaaataggcatgtaggatattataatccaatgccagtttctcagccttcttacacatccgatacttgtcagtgtacgcccggcaaaaaacatgtggtatgtcatgattctcatcaattcaagtttcatattgatacgggggaagtagattacaatacaaatctaggaatttgggtgttgtttaaaatctcttcacccgatggctacgcgacattagataatttagaagtaattgaagagggaccagtaagaggcgaagcagtgacacatgtaaaacaaaaggaaaagaaatggaatcagcaaatggagaaaaagcgcatggaaacaaagcgagtctatgaccgagcaaaacaggcggtagatgcattatttacaggagaagagttaaactatgatgttacattgtcacacattaagaacgccgatgatttggtacagtcgattccatatgtacacaatgagtggttaccggattttccaggcatgaactatgatatataccaagagttaaacgcgcgtatcatgcaagcacgctatttatacgatgcacgaaatgtcataacaaatggggattttgcacaaggattacaagggtggcatgcggaaggaaaagtagaagtacagcaaatgaacggaacgtctgtattagtcttatccaattggagctctggagtatctcaaaaccttcatgtccaacatccacatggatatctgttacgtgtgagtgcgaaaaaagaagggtctgggaaaggctatgtaacgaggatgagttgtaatggtaagcaggaaacacttacgtttacgtcctgtgacggaggatatatgacaaaaacggtagaggtattcccagaaagtgatcgtgtacgaattgaaattggggagaccgaaggttcgttttatattgaaagcatcgaattgatttgtatgaacggatatactagcaataataaccagaatatgagtaatatgtatgatcaaagttatagtgggaattatagtcagaatactagcgatatgtatgatcaaggaggttctgttgcaaagtttgaaaaagaatagaat

SEQ ID NO: 291 - DNA, 3668 bp, Bacillus thuringiensis
  source 1..3668: mol_type = genomic DNA
gactttttttgactatatgcatggcctctattccaacaatcatttttgtagctgtgcgccatgatttgaatccaagcatattccagattcattttttgataaatctatggtcttgttcaattatgttgtttacatatttttttacccgtagcggcatatcatttggtatatttttttcattttttaattctcgtatcgcaacaggataggctttatcaccatcaattgtgattacacgaggttttgtgacatgacaagaagccaatgctttctttagaaaacgcttggtagccttcgcatctcgtttcttacccaaataaaaatcaagggtgtttccttcggaatcgacagcaccatataggtacattttttcgcctttgatttttaggtatgtttcatcctgatcacgcacctttttttagtagtagtaccagtatggccaagttagaaaaatcattttcaagtttttttatgcttttgtaccagaaccgaatatttacctagatctataaatacgtataagattgataaatgttatacattctttcaattacttagtagtgacttccttaagcctacacataatatggattatagaaatattagtatagtgggaggaatcaaaatgaattcttatcagaataagaatgaatatgaaatcttagatgctaagcgaaatacttgtcacatgtctaattgttatcccaagtacccattagcaaatgatcctcaaatgtatttgcgcaacacccattataaggattggataaatatgtgcgaggaagcttcttatgcatcttcaggtccttcacaattatttaaagttggaggttctatagttgctaaaattcttggaatgattcctgaagttggtcctcttttaagttggatggtatctttattttggccaactattgaagaaaaaaatactgtttgggaagatatgataaagtatgtagcaaatctgctaaaacaagaattaacaaatgatacacttaaccgtgccactagtaatttatctgggttaaatgaatctttgaatatatataaccgagctctcgctgcgtggaaacaaaataaaaataatttcgcaagtggtgaacttataaggtcatatataaatgatcttcatatactctttacaagagatattcaatcagatttctcattaggaggttatgaaacagtattattaccttcatatgcaagtgctgccaatcttcatttacttttgttacgtgatgttgcaatttacggaaaagaattaggatatccatcaactgacgtagagttttattataatgagcaaaagtactatacagaaaaatatagtaattattgtgtaaatacgtacaaatcgggtttagaatcaaaaaaacaaataggatggtcagattttaatcgatatcgtagagaaatgactttatccgtattagatatagtcgcattattcccactgtatgatacaggactgtatccgagtaaagatggcaagatacatgttaaagctgaactaacaagagaaatctactctgatgttattaatgatcatgtatacggactcatggttccctatatatcttttgaacatgctgaatctctgtacactcgcaggccgcacgcatttacttggttaaaaggatttagatttgtaacgaattctattaatagttggacctttttatcaggtggtgaaaatagatatttccttactcatggagagggtactatttataatggaccttttttggggcaggatactgaatatggaggaactagttcttatatagatatctctaataattcctctatttataatttatggaccaaaaattatgaatggatttatccatggactgatccagttaatattacaaaaataaatttttctataacagataatagtaattctagtgagtctatttatggtgcggaaagaatgaataagcctactgttcgaacggattttaattttcttcttaacagagcaggaaatggtcctacgacatataatgattataatcacattttatcttatatgttaattaatggagaaacgttcggacaaaaaagacatggttattcatttgcatttactcatagtagtgtagataggtataataccattgtcccagataaaattgtgcaaatacctgctgtgaaaactaatttggtcggtgcgaatataataaagggtcctggtcatacaggtggcgatttacttaaactagaatatgagcgttttcttagtttacgtattaagcttatagcatcaatgacttttcggattagaattagatatgcttctaatatttctggacaaatgatgattaatataggttaccagaatcctacttattttaatattatccctacgacaagtagggactatactgagttaaaatttgaagatttccaattagtggacacatcctatatttactcaggtggcccatcgattagttcaaatacattatggctggataatttttctaatggacctgttattatagataaaattgaatttataccgttgggaattacactaaatcaagcacaaggttatgatacatacgaccagaatgctaatggtatgtatcatcaaaactacagcaattctggctataattataatcaagaatacaatacttattaccaatcgtataacaattaggttgtgttgcaaagtttgaaaaaacacaaccttgtgtgcaaaatatagttatagtttaagcggttctgaataactcctgtaattccttgtacgtcgaaaaagagaagtctggaatgtgacttctcttttgtttgtatatcgcatgaatcgtttcgattcctttcaatgtacgtgaagcatggcggagattttgaaatcctgcggatttaacaaaacggcgcttgatatgtctatgatcttgttcaatgagattatttagatgcttaacggtacaatgtttcgtatgtacatacaaaccgttatgtttcagttttttgagcgcacaaagtaaagcaggagccttgtctgtagtaagaaccgttggttctccaaaatctttaaccagtcgcttcataaacatataagcggcttgatgattgcgtgttttacgaagttgaatatccaaagtatgcccatctccaccaatagcacgataaagatagcgccattcgcctttcactttgatgtaagtctcatctaaatgccatatgaaatgtgcggatttgtttttctttttccaaatttgataaatcagattgccgtattcgtgaacccaacgcatgatggttgttggatgaactgatattccacgttctttcaagatttcagatacatcacgatagcttaaagaaaaacgacaatagtagccaacggctaccaaaataatatcttttttgaattgttttcccttaaaatatcccatgtgatatgctcctcatcccattttctctatataagttccgtttaatattttaacaattgttcagtccctaacctttgaagtaccttttcaggaaattgagaaagatgttctagaaaagaaagaacggatgtttttatttctttctgggatgcatgaaaacgattagagataacactttcttttaatgctttccaaatacgttccaataaattcaaattgggagaatacggcggtaaaaagacgagtgttgac

SEQ ID NO: 292 - DNA, 4807 bp, Bacillus thuringiensis
  source 1..4807: mol_type = genomic DNA
gcttcatttaaaaaactttgcaacagaacctcagtacatttgtttctttttatacgcacatatacatgcctgttttgcatataatattttggtgatattcttcataaaaaaggagtgattttattggtacagttatctgatttattacctagttattataatgtattagcttctccccctacaattttagatgctaaccaagactggttccccacaggtaatgatttcaaaagtgtaataaatgagctgaaagatgcttttactaaatttcaaaaagattttcatactagcgaccttattaacactatacaatccatttataactcttatggctctcaaggaatggattgggtcaatgtggctcaagctgtaataacttttgcttttggttttgtacccggtggatcattagtctctgcaggacttaataaaataataggtatatttttccccaaagaccctaatcctactgtatttgatcaaataaaagccgcagtagaacaattaatactcaattcatttatcacatatgatatacagggcgatataactgaattgaataaactgaaagattattctggaatattagcaaattctatacaagtagcgcttggtcaatcccaatttcaagaattccaacaagtaaatcctactgggccaccgacaaattgtactcataccccctcttgtactttagatccaactaaccctattccaccaaattgtagctgtttattgaattttgtatatcaaaattataataatcacacttccgatataaacacggtattacttcaaatagaaggttctattccaaagatttttgctcttattaatcaatccacaacagcaactactgctcaaaaaaaccaactaaaatctgattatttacaagcatatcttcctttatatgtaatgggcgcaactttagaaatgatatactatagaacatatattcaatttgctgaaacatttcagtatggtttaagtgaacaaaatagtactacactaacggctatgcacaacttacgtcttacaatttctagacgaactacatttctattcaataattttctcccatttttaccaagtataacttcaaatacaaaaggagatttaaattcatatattcaatatacaagacgtataacaataaatgctctggatactgctgtattttggactttactagatccatttgattatcctgtgtccgcaaatcaaacattatcccgtattatttttaatgatattgtaggaccagtagaatgtaaagctggtaaccaaaatagcaataacttactattcaatttttataacgtagatgggcaaccacttccaaataactctattactaattatttttataataatatgcaattaagaggtttgcaattccaaatatataaatatagttcaacctctacttatttctcgacaacatctgatattccaattggatttaaagcttcttatcgtacaaatggtagcgataaaaatattgatcatacacgttctctaccatacggactaaaaggatctacaacaacattaactgatgatatatatatcacgaatcctagttttaatattataaatatgaactcctctcaaacatcaggtcaaattgctacagatgtctcacaaattctatatacacctatttcagatataaaacaaaattgtttttctcaaaacagtccttatttagggaataatagaattcaagctatttatcctctacaacccactaatccaaacacttataatgcttatggtagtacagataaactcggatttttaactacactcatttcaaatgacaccactacaaaccttgtatttacttctgatcctatttatacatttcctgccgaacaagctactgtattatctggaacaaaacttgttgaatatgtgaatggtacagcttctgttcaattacaaaatgggcaaaatgctcaatacacgatagataatacaacaagaattgcaggtcctacacaatttcaattacgagtacatgtagcgacagatccagcagttacagatccaaatgttttaggacaactcgctattacaattgataatcaacgaacacaatatttaactatacccaatacaaatgttgattatagtaatccaataactcttttaaacggtcaacaacttaaccaattacgggtaaaaggaacacaaggtgcttatatgttagtacccgctagtaatctaaataatatcaatgatcgtaataccaatgtttttacattaaatccaaatgcatctatgaatgtaaatattcaaaatacaggaaatctaacagttatattagatcgtattgaattcgttcctatcgattcaacagtaataatcccagcacaaacactatattcaaatcaagcttatactctttgggaatcaacaaatggattaattggaaaacaggctttattagtagtagatgattatttacattttactgttcaatattattaccaatctcaattagtccattctaatgaacaaaatatatatgatgttaattatattggtctatttgataaaattacggctagtactatcgctgatactttagtaaaccttacaaatggaattgtttatttaactactaatacaacaccaacaccaacaccagctgtaccaagcccaattcctcctatatccaatcaaaatataggagctggatttgaatatactgtttgggatggtaataacaaaactggaaataccgtaaattttcaaggattcgctgcaccaaatagtggttccgaaggtttattatttcaatataaatataatgatcaagtaattgacacagatcaagtatcaaaccaattttctatccaacgtaaattagcaggtacaattaataaaattacagcaacaggtggaacaccaaatggagtgtatttaacgataaataatggtggttccgtgagtacaacataaaaaggaggaaaataaaatgaatccatgttctccattccaaaatatacctcaaaggaatttaaatcttcctgtttttattacaaaacaagaattagaacaaattactaaaatggtatctaacttatttttaacaacaaatcctgctttattacattgtttaccacctgatattacgttattagctcctcatgttagtgattattggattgatcaattactaatgaaagttgataaactgtcaactgaattatatggtgtcgaaaaacaagaattacgaaaattattaaatatagccaaacaaatgagtgttgcacgaaataaattaataggtggaaactttgaaacagtagaggcttggacattcggtacacaagcaactgttctttccaattcacctttatttgtagggaattttctatctttagaacctacaaatggtatatggacttcctacgcatttcaaaaaattaatgaatctcaattaaaaccatttacacgttatagtatttctggttttatcgctaatagtcaagggttagaacttacaatttcacgatacggaacagaattacaaactgttataaacattccaattgaaacagcacttcctatttatccaaatccaattccaaattgttgccagccaagtccatgtggatgcgattcttgtcaatatagagattcacatctttttaactattcaattaatgtaggtactttatttccagaattaaatcctggtattgaaattagtttacgcataatcgaaccaaacggaagagccagaattagtaatttagaagtaatagaagagcgtcctcttacagaagaagaaagaagacaaattcaacgaacagaacaattatggctaacaagagtagaaagagaactaaaaatcatttgtgatttatttgaaccaattattaaacaaattaactcctactttccagaaggggattggaacaatcacattttttctcatgtcacatatcaagatttatatagtattgtcataccggcactcccgatcattgaaaattggtctatgacgcatttgacaggtatgtataatcatctagtacgaccgattaaagaagtgatccaacaaattgaacaacaattagaagctcgaaatttacttcataatggaaatttttcaaatggactgacagattggactgtttgtggtgaagcaaccataatacctttaacaaatcaaaatcaagctttattcctttcttattgggattctatggtttcacaaactgttacagttgtaaattttaatccagataaattgtatttattacgtatctatgcaaaaggaaatggaactgttcttgttcaacataatggacacacagaacgtgttaacttcacacaagatttcttccaatcaaaagaacatactttttatctagatatggcaacctttaccgtagatattcaatccaattcaaatgattttacagtagattatgtagaaattatagaaatataaaataaacaaaactacatgtttttacttcatgtagttttttctctctttcttactctattcaagaaacgaggtgattgtatgcaaaaaaaaacaattttaataaattcttcttccacttctagcccctctccttccacctcttctttttcttcttctcaattactacaacaaggatataccaaaaaacaaggttgtaattgtaataaatagacaaacaaaaatagtgtatttaaaaaagttgcaaagtttgagaaatcataagtctgtttacaaaatactcttgtcatttaagcggttctgaataatggctataattctttctacgtcgcaaaagag

SEQ ID NO: 293 - DNA, 2169 bp, Bacillus thuringiensis
  source 1..2169: mol_type = genomic DNA
atgaaagaacaaaatctaaataaatatgatgaaataactgtacaagcagcaagcgattatatcgacattcgtccgatttttcaaacaaatggatctgctacatttaattctaataccaatattacaactttaacacaagctataaatagtcaagcaggagcaattgcaggaaagactgctctagatatgagacatgactttacttttagagcagatatttttcttggaactaaaagtaacggagcagacggtattgcaatcgcatttcatagaggatcaattgggtttgttggaacaaaaggcggaggacttggaatattaggtgcacctaaagggatagggtttgaattagacacatatgcgaatgcacctgaggacgaagtaggcgattcgtttgggcatggggcaatgaaaggatcattccctagtttcccaaatggatatccccatgctggctttgtaagtactgataaaaatagtagatggttatcagccctagctcagatgcagcgaatcgctgctccaaacgggcgttggagacgtctggagattcgttgggatgctcgtaataaagagttaactgcaaatcttcaggatttaacttttaatgacataactgttggagagaagccacgtactccaagaactgcaacttggaggttagtaaatcctgcatttgaacttgatcagaagtatacttttgttattggttcggcgacgggtgcatctaataacctacatcagattgggattatagaatttgatgcatactttactaaaccgacaatagaagcgaataatgtaaatgtcccagtgggagcaacatttaatccaaaaacatatccaggaataaatttaagagcaacagatgagatagatggggatttgacatcgaagattattgtgaaagcaaacaatgttaatacgtcgaaaacgggtgtgtattatgtgacgtattatgtagagaatagttatggggaaagtgatgaaaaaacaatcgaagtaactgtgttttcaaaccctacaattattgcaagtgatgttgaaattgaaaaaggggaatcttttaacccactaactgattcaagagtaggtctttctgcacaggattcattaggcaatgatattacccaaaatgtaaaggtaaaatcgagtaatgtggatacttcaaagccaggggaatatgaagttgtatttgaagtgacagatagctttggtggaaaagcagaaaaagatatcaaggttacagttttaggacagccaagtatagaagcgaataatgttgaattagaaatagatgatttatttgatccattaacagatgcaaaagtaggtctccgtgcaaaggattcattaggtaatgatattacgaaagacgtaaaagtaaagttcaataacgtagatacttcaaattcaggaaagtatgaagttatatttgaagtgacggaccgttttggaaaaaaagcagaaaaaagtattgaagtccttgttctaggagaaccaagcattgaagcaaatgatgttgaggttaataaaggtgaaacgtttgaaccattaacagattcaagagttggcctccgtgcaaaagactcattaggtaatgatattacgaaagatgtgaaaataaaatcaagtaatgtggatacttcaaaaccaggtgaatatgaagttgtatttgaagtgacagatcgttttggtaaatatgcagaaaaaacaattggagttatagtgccagtaattgatgatgaatgggaagatggaaatgtgaatggttggaaattctatgctgggcaagatattaaactgttgaaggatcctgataaagcctataaaggcgattatgtattctatgattctagacacgttgctatttctaaaacaattccactaacggatttgcaaataaatacaaactatgaaattacagtgtatgctaaagcagaaagcggcgatcatcacttaaaagtgacgtataagaaagacccggcaggtccagaagagccgccagttttcaatagactgattagcacaggcacattggtagaaaaagattatagagaattaaaagggacgttccgcgtaacagaattaaacaaagcaccattgataatcgtagagaattttggagctggatatataggtggaattagaattgtgaaaatatcgtaa

SEQ ID NO: 294 - DNA, 3711 bp, Bacillus thuringiensis
  source 1..3711: mol_type = genomic DNA
atggacccaaatgatcataatgaatatgaagtcatggatactggcagcatgggctatcagccaaggtatccccttgcgaatgcacctggtgctgaattgcaacagatgcattacaaagattggatggatatgtgtacgtatggggaatcagtagcattatccgaggggcttagggctgcgctatttgttgctaatagtattatagggataatgctttcaaagattccaattgtgggtcctatagtatcaacaccctttcaaataatgggcgcagtacttccattcttgtggccgccaaacgcacccgaggcccaattttcatgggaaagcctgatgacagctgcggaagagattgctgataaaaagatcgacgcacaggtacgagctaatgcgaatgcagaattagaaggagttcataacgctatacgactctatcaagatgccgtttgcgattggaaacaagatcctaccaatgcccaactgaaggaacaactccgaatacaatatattgctacgaataccgttatctttagtagaatgccgtcttttcgagtacgaggatttgaagtcccattactcagcacttatgtgcaagcggctaatttacatttaatccatttaaaagatggagttcaatttggagaagaatggggaatggactcagcaacagttgatcgattttatagctacctaaaatcagatatagaaatctatacgaattattgtatagattggtataataaagggttatcggatagtatagaatctgaacccacttggaatggttggaatacgttcaataatttccgcagggatatgactcttatggtccttgatttagtttcgatatggccaacatatgacccgagacgctatccccttcctaccaaatcacaattgacacgagaattatatacacaagctatagggagttataaaagtgttgagcctcttctgccccctccatctccatttagatggttacgtgaaatagagttttttttaagagacagtcaggatgaggtggaacagtttgctggttttcaacaggggtatcaatacacgcttgacaccaccatctatcgtccaccagtagttggtacacggacttccctagttgatagtattgctatgggactgggttctgatgatgtagtgtatagaataaagaatatttcctacaatggatggtttccaaaaaaacttgatttttattatactccttccgaacgcgttgaaagtgtaggagagattcgtactgatgctaataatatgattgattatatcggacttggttgtagggcgaaggtgactgaaccttgtgatccttgtacgactaattgtacgattgatactgtgaatacaaccgcatcttgtgacaatcctaatctttatagccatcgattgtcatcgataaacccaagtgctccatacccgggtcaaaattggatgtttagcttttgctacggctggactcatttcagtgtagatgacaacaatttgatagcggctgacagcattactcaaatccccgcagtgaaagcctatagaatagggggatatggcaaagtaatgaaagggcctggttatacaggcggggatttaatggtgttttatggggcaggggaaatcaactggagacttaccattccggacacgacaaaggcttatcgagtgcgagctcgtgtggcaacaatccctacttctcagcctgtagatacagtgaggtataatcagtttgaatacagggatatagaagtaatatctccaacaactactgtacatgagtattccataggattcgatatcactggtgatgactgggggctgttggacaaaatcgaattcatcccaattgaaggatccgtggaagaatatgaagcagaccaagctttagaaaaagccagaaaggcagtgaacgccttgtttacaggtgatgcgaaaaatgccttacaattgaacatcacagattacgcagtggaccaagctgccaaccttgtcgaatgtgtatcagaggagttccatgcccaagaaaaaatgatcctcttagaccaagtcaaatttgccaaacgactcagtcaagcacgcaatctattaaactacggagactttgaatcgtcagattggtctggagagaatggatggagaacaagtcctcatgtccatgtcgcatctaatcatccaatctttaaagggcgctatctccatatgccaggtgcgacaagttctcagttttctaaccatatctatccaacttatgtatatcaaaaggtggatgaatcaaaattaaaatcctatactcggtacatggtacgcgggtttgtcggcaatagtaaggacctagaattactggtagaacgatatggaaaagatgtccacgtggaaatggatgtaccaaatgatattcagtatacgttaccaaggaacgaatgtggtggctttgatcgatgcaaaccagcatcctatccaacaagcacttctcacacatgcacatgtaaagatacggctccaatgcatacggattgtcagtgtcaggacaagatgaatcgtactttggcagatacgtatcacaatgaatcatcgagtcgtgtgatgtatgcggacggattccatgctcatacgtcctgtggatgtaagaacagtgacaggtatcaaaacggaacacgtccatctaaatcttgtggatgcaagaacccacatgtcttcacataccatattgacacaggatgtgtggatcaagaagaaaaccttggtttgtggttcgctttgaaaattgcgagcgaaaatggtgtcgcaaacattgataacctagaaatcattgaagcacagcagttaacaggagaggcgttagcgcgtgtgaaaaaacgggaacagagatggaaacaagaaatgacaaaaaaacgtttagaaacagagaaagctgtacaagcagcgcaaggtgcgattcagaatctgttcacaaacgcgcagcacaatcgtctgaaatttgaaacgctattccctcaaattgtccatgcagagaagctcgttcaacagattccctatgtgcatcacccattcttgagcggggcgctgccaactgtaccaggcatgaattttgaaatcatccaacaactattggcagtgatcggaaatgcccgtgcattatacgagcaacgaaatctcgtgcgtaatggtacattcagctcaggtacaggaagttggaaagtgacagaaggggtaaaagtgcagccattgcaaaacacatctgttcttgttctgtccgaatggattcatgaagcgtcccagcagttacacattgatccaaatcgcgggtatgtgttacgtgtaacagcgcgaaaagaaggcggaggaaaagggactgtaacaatgagtgactgtgcagactatacagagacactgacctttacatcatgtgactttaacacgtctggttcccaaacgatgacaagtggtacattatctggatttgtgacgaagacgctagaaatcttcccagacacagatcgtatccgtattgacatcagtgaaacagaaggtacgtttaaaatagaaagtgtggaactcatttgtatggaacacatggaagaccacatgtatgatatcgccggaaatgtggtggaagagatgcgttacctagattcatctcgttcgatgggtggtacattagatgcgatgtgttatacaaaaattggagagtttggttgttag

SEQ ID NO: 295 - DNA, 1158 bp, Bacillus thuringiensis
  source 1..1158: mol_type = genomic DNA
atgttagatactaataaagtttatgaaataagcaatcttgctaatggattatatacatcaacttatttaagtcttgatgattcaggtgttagtttaatgagtaaaaaggatgaagatattgatgattacaatttaaaatggtttttatttcctattgataataatcaatatattattacaagctatggagctaataattgtaaagtttggaatgttaaaaatgataaaataaatgtttcaacttattcttcaacaaactctgtacaaaaatggcaaataaaagctaaagattcttcatatataatacaaagtgataatggaaaggtcttaacagcaggagtaggtgaatctcttggaatagtacgcctaactgatgaatttccagagaattctaaccaacaatggaatttaactcctgtacaaacaattcaactcccacaaaaacctaaaatagatgaaaaattaaaagatcatcctgaatattcagaaaccggaaatataaatcctaaaacaactcctcaattaatgggatggacattagtaccttgtattatggtaaatgattcaggaatagataaaaacactcaaattaaaactactccatattatatttttaaaaaatataaatactggaatctagcaaaaggaagtaatgtatctttacttccacatcaaaaaagatcatatgattatgaatggggtacagaaaaaaatcaaaaaacatctattattaatacagtaggattgcaaattaatatagattcaggaatgaaatttgaagtaccagaagtaggaggaggtacagaagacataaaaacacaattaactgaagaattaaaagttgaatatagcactgaaaccaaaataatgacgaaatatcaagaacactcagagatagataatccaactaatcaaccaatgaattctataggacttcttatttatacttctttagaattatatcgatataacggtacagaaattaagataatggacatagaaacttcagatcatgatacttacactcttacttcttatccaaatcataaagaagcattattacttctcacaaaccattcgtatgaagaagtagaagaaataacaaaaatacctaagcatacacttataaaattgaaaaaacattattttaaaaaataa

SEQ ID NO: 296 - DNA, 1164 bp, Bacillus thuringiensis
  source 1..1164: mol_type = genomic DNA
atgatagaaactaataagatatatgaaataagcaataaagctaatggattatatgcaactacttatttaagttttgataattcaggtgttagtttattaaataaaaatgaatctgatattaatgattataatttgaaatggtttttatttcctattgataataatcagtatattattacaagttatggagtaaataaaaataaggtttggactgctaatggtaataaaataaatgttacaacatattccgcagaaaattcagcacaacaatggcaaataagaaacagttcttctggatatataatagaaaataataatgggaaaattttaacggcaggaacaggccaatcattaggtttattatatttaactgatgaaatacctgaagattctaatcaacaatggaatttaacttcaatacaaacaatttcacttccttcacaaccaataattgatacaacattagtagattaccctaaatattcaacgaccggtagtataaattataatggtacagcacttcaattaatgggatggacactcataccatgtattatggtatacgataaaacgatagcttctacacacactcaaattacaacaaccccttattatattttgaaaaaatatcaacgttgggtacttgcaacaggaagtggtctatctgtacctgcacatgtcaaatcaactttcgaatacgaatggggaacagacacagatcaaaaaaccagtgtaataaatacattaggttttcaaattaatacagatacaaaattaaaagctactgtaccagaagtaggtggaggtacaacagatataagaacacaaatcactgaagaacttaaagtagaatatagtagtgaaaataaagaaatgcgaaaatataaacaaagctttgacgtagacaacttaaattatgatgaagcactaaatgctgtaggatttattgttgaaacttcattcgaattatatcgaatgaatggaaatgtccttataacaagtataaaaactacaaataaagacacctataatacagttacttatccaaatcataaagaagttttattacttcttacaaatcattcttatgaagaagtaacagcactaactggcatttccaaagaaagacttcaaaatcttaaaaacaattggaaaaaaagataa

SEQ ID NO: 297 - DNA, 3727 bp, Bacillus thuringiensis
  source 1..3727: mol_type = genomic DNA
atgaattcatatgaaaataaaaatgaatatgaaatattgaatgattcaaaaaaatctaacatgtcgaacccttatttacggtacccactagcaaatgattcactagcttctatgcaaaatacgaattataaagattggttaaccatgtgtgatagaactgatactgatgttttaagcagcagaggtgcagttagtacgggggtgggtatgctttctacgattttgagcctttttggcattccacttatcggagaaggaattgatttattactaggagcggcagatttcctttggccagaatccgatggcggccatcaatacacctgggaagacttgatgaaccatatagaagagcttatggatgaacgattagaaactgaaaaaagaactactgcacttgacgatttacgtggtctaaaagctcttttaggtctattccgtgacgccttcgattcttgggaaaaaaatcaaaacgacccgatagctaaaaatagggtcggcggctattttgaagatgtgcatacccattttgtgaaagatatggcgtctatattttcagctacaaattatgaagtattactattacctgtctatgcacaagctgcaaatttacatttacttttattaagagagggagttatttacggaagccgatgggggatagctccagcagctgatttctatcatgaccaactattgaagtatacggccatatacgcaaaccactgtgttacttggtataataatggtttagctcaacaaaaagaactgttcgcaaaatcaccaaactggaaccgcttcaatgcatatcgtagagatatgacaattactgtattagatatcattgcattattcccaacttacgacgctcgtttgtatacaaaaccaataaaaacagaacttacaagagaaatctattcagatgtattgaatttagatgtatatggggtacagcagacagatttgaataaaaatgaggccgccttcacacggtccccacatttagttacaagattacgaggttttgatttttacacaagaactaagtatgcatattggagatatttggctggccatacaaattatttttcttttacgggtaatggtactatttattcaagttcatttaataactggtatgatacagatatgaccaagagtacaataaacattccagactatgctaatatttataagttatggacaaaaagttatacgaatatatctccctatacggacccagttggtatctcacaaatgcaattctctctaacaaataatcagcagttaacttatacgggtacgagtgccccaaagtatcctgtacgcgaaacgttctttgaaataccacctacggatgagaagccgctaacttatgaaaattatagtcacattttatcttacatgactagtgctcaacattttggagataaaaaaataggatatacatttgcttggatgcatgaaagtgtagattttgacaatcgtgttgatccagataaaatcacacaaataccggcggtgaaaggggattatcttcaatatggatatgttaagcaaggccccggtcatacaggcggagatcttgtgtctatgattcgtactgatcgtttagggataaatgtttattttcctcaaccactagactatcgtatacgtattcgctattcaacaagtagtaatggttatctatatatttattcacctaatactaaaatagtatatctcccacccacaaccttagtagatggtcaacctacttttgacccgatggacttcagtgcattcagagttgtagaagttccagctagttttcgtgcaagtgttgcgggctatacaaactttactattgaagcagggtttggcccagtatatatagacaaaatcgaatttatcccagataatacaacaactttagaatatgagggaggaagggacctagaaaaaacaaagaacgcggtgaacgatctgtttaccaattaaaacaaatgattaactagagtaggtggtatcgctgttaaaaaaataagcggaaaaggttgtgaatcctatgtttatcagtaatataaaaaatacgctaaaaatagaaacgacagattatgaaatcgatcaagcggccatttctatagaatgtatgtctaatgaacattcttccaaagaagaaatgatgttatgggatgaagtaaaacaggcaaaacaacttagctggtctcgtaatttactctacaatggtgactttgaagatgtatcaaacggatggaaaacaagtaatacgattgagatccgagagaatagtcccgtttttaaaggacattaccttcatatgtttggggcaagagatattgatggaaccctatttccaacttatatctaccaaaaaatagaagaatctaaattaaaaccatatacacgttatcgagtaagaggatttgtgggtagtagtaaagatctaaaattaatggtaacacgttacgggaaagaaattgatgccatgatgaatgttccaaatgatttggcctatatgcagcctaccccttcatgtggagattctcgctgtgaatcatcgtcccggtatgtgagccaagggtatcctacaccagtaacagatggatatgcttctggtaggtatgcatgccagtccaatcgaggtacaaagcatgtgaagtgtcacgatcgtcatccatttgattttcatattgacaccggagaattagatacaaatacaaacgtaggtattgatgtcttatttaaaatttctaatccagatggatatgctacattagggaatctagaagtcattgaagaagggccactaacaggagaagcattaacgcatgtgaaacaaaaggaaaagaaatggaaacaacacatggagaaaaaacgttgggaaacacaacaagcctacgatccagcaaaacaggctgtagatgcattatttacaaacgaacaagagttacactatcatattactttagatcatattcaaaacgctgatcgactgatacaggcgattccctatgtgtaccatgcttggttaccggatgctccaggtatgaactatgatggatatcaagggttaaacgcacgtatcatgcaggcgtacaatttatatgatgcacgaaatgtcataacaaatggtgactttacacagggactaacgggatggcacgcagcagggaaggcaatggtacaacaaatggatggcgcttctgtattagttctatcaaactggagtgcgggggtatctcaaaacttgcatgtccaagagcatcatggatatatgttacgtgtgattgctaaaaaagaaggacctggaaaagggtatgtaacgatgatggattgtaatggcaatcgggaaacactgaagttcacttcttgtgaagaaggatatatgacaaagacagtagaggtattcccagaaagtgatcgtgtacggattgaaataggagaaaccgaaggtacgttttatgtagatagcatcgagttgctttgtatgcaaggatatgctagcaataataacccgcacacgggtaatatgtatgggcaaagttataatggaaattataatcaaaatacgagcgatgtgtatcaccaagggtatacaaacaactataaccaaaactctagtaatatgtataatcaaaattatactcacaatgatgacctgcattccggttgcacatgtaaccaagggcataactctggctgtacatgtagtcaaggatag

SEQ ID NO: 298 - DNA, 930 bp, Bacillus thuringiensis
  source 1..930: mol_type = genomic DNA
atgatttttttggcaattttagatttaaaatctttagtactcaatgcaataaattattggggtcctaaaaataataatggcatacagggtggtgattttggttaccctatatcagaagcacaaatagatacgtctattataacttctactcatcctcgtttaattccacatgatttaacaattcctcaaaatttagaaactatttttactacaactcaagtattaacaaataatacagatttacaacaaagtcaaactgtttcttttgctaaaaaaacaacgacaacaacttcaacttcaactacaaatggttggacagaaggtggggcgatttcagatacattagaagaaaaagtaagtgtatctattccttttattggagagggaggaggaaaaaacagtacaactatagaagctaattttgcacataactctagtactactacttttcaacaggcttcaactgatatagagtggaatatttcacaaccagtattggttcccccagccaaacaagttgtagcaacattagttattatgggaggtaattttactattcctatggatttgatgactactatagattctacagaacattatagtggttatccaatattaacatggatatcgagccccgataatagttataatggtccatttatgagttggtattttgcaaattggcccaatttaccatcggggtttggtcctttaaattcagataatacggtcacttatacaggttctgttgtaagtcaagtatcagctggtgtatatgccactgtacgatttgatcaatatgatatacacaatttagcgacaattgaaaaaacttggtatgcacgacatgcaactcttcataatggaaagaaaatatctataaataatgttactgaaatggcaccaacaagtccaataaaaacaaattaa

SEQ ID NO: 299 - DNA, 750 bp, Bacillus thuringiensis
  source 1..750: mol_type = genomic DNA
atggaaaatttaaatcattgtccattagaagatataaaggtaaatccatggaaaacccctcaatcaacagcaagggttattacattacgtgttgaggatccaaatgaaatcaataatcttctttctattaacgaaattgataatccgaattatatattgcaagcaattatgttagcaaatgcatttcaaaatgcattagttcccacttctacagattttggtgatgccctacgctttagtatggcaaaaggtttagaaatcgcaaacacaattacaccgatgggtgctgtagtgagttatgttgatcaaaatgtaactcaaacgaataaccaagtaagtgtaacgattaataaagtcttagaagtgttaaaaactgtattaggagttgcattaagtggatctgtaatagatcaattaactgcagcagttacaaatacgtttacaaatttaaatactcaaaaaaatgaagcatggattttctggggcaaggaaactgctaatcaaacaaattacacatacaatgtcctgtttgcaatccaaaatgcccaaactggtggcgttatgtattgtgtaccagttggttttgaaattaaagtatcagcagtaaaggaacaagttttatttttcacaattcaagattctgcgagctacaatgttaacatccaatctttgaaatttgcacaaccattagttagctcaagtcagtatccaattgcagatcttactagcgctattaatggaaccctctaa

SEQ ID NO: 300 - DNA, 792 bp, Bacillus thuringiensis
  source 1..792: mol_type = genomic DNA
atgcaccttaataatttgaataattttaataatttagaaaacaatggtgaatatcactgttcaggacctattattaaaaaaccgtttaggcatattgcattaacagttccatccagtgatataactaattttaatgaaattttttatgtagagccacaatacattgctcaagcaattcgtttaacaaatacatttcaaggagctatagatccacttaccttaaatttcaattttgaaaaagctttacaaattgcaaatggtcttcctaatgcaggagttacaggaactattaatcaaagtgtaattcatcaaacaattgaagtttcagttatgattagtcaaattaaagaaattattagaagtgtgctagggctcgttatcaatagtgctaatttttggaacagcgtagtatctgctattacaaatacatttacaaatttagaacctcaagtagatgaaaattggattgtttggcgtaatttatcagctactcaaacaagttatttttataaaattttattttctattcaaaatgaagatacaggtagatttatggcaatattgcctatagcatttgaaattactgtggatgttcaaaaacaacaattattattcattacaataaaagatagtgcacgatatgaagttaaaatgaaagctcttactgtagttcaagctttagattcttataatgcacccattatagatgtatttaatgttcgtaactatagcttacatcgtccaaatcataatattcttcaaaatctgaatgttaatccaataaaatcgtaa

SEQ ID NO: 301 - DNA, 7305 bp, Diabrotica virgifera
  source 1..7305: mol_type = genomic DNA
acaactgacacataacgtcagtagttgtctattttcactggtgactaatttttgagaattagtaattggtttcgtatttttttcttaacaaaagggcaaaatgagcttttttggaaaattgttcggggggaaaaaggaagagatagcccctagtcctggggaggctattcaaaaactcagagagactgaagaaatgttaataaaaaaacaggattttttagaaaagaagatagaagaatttaccatggtagcaaagaaaaatgcgtcgaaaaataaaagagttgcactccaagccctcaaaaagaagaaacgattggaaaagacccaactacaaatagatggaacccttacaactattgaaatgcagagggaagccctcgaaggagctagcacaaatactgctgtattagattctatgaaaaatgctgcagatgcccttaagaaagctcataagaatttgaatgtagatgatgttcacgatatcatggatgacatagccgaacaacacgacatagccaacgaaatcacaaacgctattagcaatcctgtcggattcaccgacgatctggatgacgatgaattagaaaaagaattagaagagctcgaacaagaaggattggaagaagacctgctccaagtgccaggtccaactcaactgccggctgtgcctgctgatgcagttgctactaaaccaatcaaaccagcagctaaaaaagttgaagatgatgacgatatgaaagaattggaagcctgggcctcgtaaaattcctgaaatctggatatttgtaaacgaaatcacccatctaagatgaaaacattataaatatataggtaataacagctaaaaacgtttcaatgtagaacaagcttttgctgaaaaggcgtcttgcaaaaaatgttgataatttagaattctctatatattatatatttgccctttaaggaaagatttcttttatagtcatagttcaaccaaacgtttcataaattagaatacaggggtgtcagaattctacgtgaatttattgaaaaaaaagaactttccttaaagttggcataatgatatttttgaaattatgtaaataggtatatgtatgctcttactaacggttttaatattgggtttagaagcaccttaattttatttttatacaaggtagtaacattttttcattgtaatttgttaaaaaatattgtataacgcaaaaaatggtgtgataaagcaaaatattattgagtgcttattttcttattttattaaaagatcttatttacgttaaatctaaatatattgggtatctcagaatatgttaacaaaggtttcttgtatcaacagaaaaatacaaacttattcattattgtggttcatttgattatgcttgtgtatatttaatctgccataaacaagttttgataaatgtcactgctctgtactttttgtttttctgactgtagtttctgtcgtttgtaattccttggtctcggccatcgcccatacacacatagggaatgttgtataaaagaaatgatagtagactagcaatggcccgaacagcaagaattaaataattaaaatatggaaagactgaatactaagctgagattggtcaaagcccttatttttcctattgctatatacgcagctgaaacatggactctcaaaaaaatcaatcgaagtaagatcgaagccttcgaaatgtaggtctacagaattattgtacccgtgtcctggagagaacacagaaccaacctgtcaattctgaaagagcttcatataaaagacaaggtattaaaaaaagtataccgaccatacttaaattactttggtaaagtaacgattactatacgaagaggcaaatcgttactttgattactctgattacttcgtaccaatcgtatcagagcgagtaacgactattgtatctactttgattacttcgtatcagagcgaataacgactattgtatctactttgattactctgattacttcgtaccaatcgtatcagagcgagtaacaactattgtatctactttgattattctgattacttcgtaccaatcgtatcagagcgagtaacaactattgtcagggccgcgtttaggtcaaatgacgccctaggcaattctctagtagccgcccttcaaacatgtaccatttttgcgaaaaaaaatgcaagcagaattttttatttaaataagaatgttattgcacaaatctcggtgttcttcaaataatgtttagaaatgtgttaaaaatattctttattttacatcaggcgtaatgttacatattactattataagtatgtttgagcgtttggaactgtgtccaatgcatgcgttttaatgcatgatacgtagaaattgcctgtttgtagccgcacctacttgttcgattttaaatgagagatgcattgaaaacattactcaagcactatgtgtttatagctttgtttaacaataaaaaaattaatttttagcaatgcaaataatcaaaaccggtataatttgacatgcactttcaaatgcggtaagcagaattgctattttattttttaatcaaaagttattcggattcaaaaattgcaatttttcgatattttgaaagttcaaccgcgtctatctcgaaaactatgcatcctacgaaaaaactttaacaacattttttgcttagaatgacccaaaaaaaatagaaaaaaggtttgttttgctaagaatcactgttatgtaattcctcaagttctttgtttataataaccttatccggaaaaaattagactgttttaataaatatctagacaaattgcatatttgtaatgtacacaaaagtacatacaaattaaaagttctaaaaaaataaattttgtaattttatgtcaactatcttaattgagtgcaaaaaatgcaagaaatcgcgttgattgcactaaattgttaataattaaaaacagacgcgaactctaggcaggaaacaagtaggttttcatcctataggtcaacagtcaacaataactaaaaacgtagtcatctacctcaatatttcagtggcccgaacatggtctattttttgcttatttccctggagtaggtatatcagtgtgacgacactaaccttatctacttgtaataatacagtttgaaaatcccaaccctaactcgatgtcctactgtcgacaagtcaaatctttagtttttgcaaaatgtgcaatattgaagtgttcaatggcccaccgcatttgcccagctgccggcggcctaataatcactaaatttatgacttccatcctttttaaatgaatagtgttaagataacagaatgctatgtttgatttatttttgttatgaatgcagtttgttttattctatttagaaatgaatgccaacttctatttcattgatggatgaacatacagacttgttattcgattttaatttttatatacaaatatttttttgtacagtatttttgccgccctctcacaatttgccgccctaggcaactgcctatattgcctaatggatacagcagccctgactattgtatctacaacctgtacacttaaatactttctaccaatcgtatcccagcgagtaacggacgagacacgtattttacgagtgttatcgaatatcgttatcggtttgaaacgttttaagggtgtgagggtgaggagaagatagaagatgaaacagagggagatataatgtataggtaaaatatttaatgtatgtcgctaacaaagatcgaatgcgagaaccctatatttttatctcgatctatatctatacctatacaaaatacctacctactgagaaatacgattctcgatatgattaccggtactcaaatacaaaagtcatcatagtaatcaaagtaacgaatactgtaaatgattactttatacaaaagtaacgatttgtaacgaatactcgacagtaactataatcaacatcactaatagtcggaagaacgtggactatataattattaatattagaaggaaatgccgaagaccaagaagaagatctcgaacacgatggacagaccaaattaagactctggtgggaaaatcacaatatgaaagcgtccatctggcacaggatcgcagccattggatacagcaagctaacaatatttagagtatcaccacgccccgacaaaggctcaaggaatgaggaggagagggttttcatattgaaactaattgtaaaggtgcgtcaagatatgctccgaatgccgtatcgaacctcctcgcgaacttaaatgtggacggcaccctgcaacaacgtactgaacctcgtcgcgatcagggtgcaacatcgaactgttccactagtttccggtaaatccatccacatcaaagtaaagggtcgtcgaaaggttcagaacgaggtttgccgtaaattcacatgtggactagtttgcgaagcattcggcgtttcggtcattgttattttgaaattgagtgcatcaacatggaatgaatggatgagaattgtactactaatagaaaattatcgagaaaacgaaatattatgggaaccaaagagtcccagatattataacaaaataaaaaaataatgcataagtatataagctgatgcagcaacgtccatcttgcagtaaaggtgttaaggcaattactgatggaacatcaaaatgttcggttcgttgcttatttcaagaccccttgcgacaacgtcgcgaacctctgttgatcgcttcgatgttcgcgacgaggttcgatacggcatggcattcggagcatgtgtggacgcacccttagtacaacgagttttatttctgtagaagttttttgacagtttacaaacggtgcgctctatgcttgtatgaaaattaacttttttcttatggttgtatggttatcaaatactattgactgtaaaacatccaactcccacaaaaatctggaagcacgttgccactagcgccactgtcggcttgagttgaactacgttttgacaacgtaaaatttgacgtaaacattcaaatttaattttataaatttttgaataacgagctaattttgctaaattaaattaaaataaaaatagttcaaacacttatacaaaaacaattataaagccattttataaatgtaaggttagattgctctggttatcctactcataccgctagatggcgctatttttttgcttcctcaaagttaatgggaaatgtcaagagttgtgtgtattacagtctatagtatttggtgatagtacggactatgtcataattataatttatgaggccaatcctcgccaatgaagaagtacttcgctgaatgaccggcaaaaggcgttaaaattctgtaaaatgtacaactgacaattatagttcagcgcaaatttaagtacatgcagcatagctgcatgctgcatgattcgcgaggttagtgtgtagagatccagacagcagctgtagattaaaagaaattattatcatgatgcgataggatgcgatggaaaagcttatgggtaaactatgagttaacaaaaatcctcaaatcgatacaagggtttgcaaaagatagttgtaatacgatctaagcaaatcgtacaatagggatgtagtatagtattaatacagtacgaaagtatttattttatattcggtttaaaatttactaaaaataaaataaaatgtcgcgttttagggttttctattatagaaactaccgtttctcaaatatcaataaattttattcaacggtcttccaatgactccatcccgttttctttggtgttcgtctgaaagtgttgcaaatgtctctgttatagccgcaatggcttcttgtttggacgacaagcactgataagaaaaactgacttaaattttaaaaaacagatgaaattctaagagaatcaaacctggaatttagatgggtcttccattacttcatagtgtagatcctcctaatccaagatattttgtggacagtttcattgtcctggcagaaaaggattagtgatcatctcatgatcttgaccttgtagaaaactctatattgttgaattccgatgaaagatgtgcgatatctgagcgattccaagagcttatcagactaccttagtaaatcatgtacagtaagcgccaccctactagatacatgggtaggtacctaattgctatgtttatgtgctagtccggtccgttctcaaatgtgactttcatccctgtcatgttactgtcaagaaactattcaaaataattgtttttccgtacaaaaaatacattaattaatagtattagtactctgctttaaaataactttattcaaacaccaagaatattacaatactttaaaacttttacaaaacaaaatgacaactataaacgtcaaaattagatcagctgatctattatttgtcaacttcatatgttaatattgtccttttcatgatcatttttcagtgcgtaacaaatgataggagaaagggtaagtccgtgataatacacatttatgacatttattctaacatgacattttagttaaatctgacagttgtcacattttattttcaatttggaataaaaacaaagcaaatgtgtttcttgcatttataaaatggtattttctttgatttgtatagtgtatagtcttataaattatacagattatatttgtaatattattatctaattaaaaaaaattatttttttattatggcgccatctatcgacaactaaaataactagaagaaatgttataaaaatgtcaccgacgaaatgtaatcaccgacgtgcttttttttctgtctcatacaagttaatgtgttagaaagaaatcgaaaaactgtgacgcactgaaagatgatcatgagaaataatttattcagtttctatacattttctgacgttctaaacgtcactagacataaataaacaagtgaagggtccaggactgtaatagctctatgttcctatgtatctagtagggtggcgcgcactgtataattggattattattcaatttgtctactgtaacgtctcggttcttaatacaactcctggctttttttatttattttttgtatttttttttcagggaaccttttttatctagttatttttttataataatagtaaaccatgatttttatttttttcccaattgagtgcatagataaaagcgcgtttgcatatatgggacacccagtattaaaaaatatgcattacatttttctttacttggaccttgtgtacctgtaacctacattcaccaaattgtgttttgtattctaattttaaatacagtaatatattttgattcactta

SEQ ID NO: 302 - DNA, 1093 bp, Leptinotarsa decemlineata
  source 1..1093: mol_type = genomic DNA
cattattgggttggcgacactgtgaatgactaatagtagttggtctatcagccataatttgttgcttgtttagtgcaaatatgagttttttcggtaaattattcggtggcaagaaagaagatgaaggggcctcgcctgcagaggcaatacaaaaacttagagatactgaggaaatgctcattaaaaagcaagactttctggaaaagaagattgaagaatatactctaatagcaaagaaaaatgcatcaaaaaacaaaagagtggccctgcaagccctcaagaaaaagaagcgattagaaaaaaatcagttgcaaatagatggcactttaactactattgaacttcaacgagaagctctggagggagctagtacgaacaccacagtattggaatctatgaaaaatgcagctgaagctcttaagaaagcccataaaaacttggacgtggacaatgtgcatgacatcatggatgacattgctgagcaacatgatattgcgaacgaaatctctaatgccatcagcaacccagttggattctcagatgacttggacgatgctgagttggagaaagaactagaagaacttgaacaagaaggtctggaggaagatttactcaaggttcctggaccgacggaattgccagctgtcccaactggcgccattgccaagccagtcaaaccagctaaaaaagtggaggaagatgacgatatgaaagaactcgaagcttgggcctcataaaatgttcatggttgctaggtttgttgaaattttataaaaatatgtaggcacccatctaacccaagagattcaaagttattaatatatcactgaagtggagttgaatatcttgtttattggtggtgtaaataagaacccaactcttgatttctcctccgaaggcttgggatgcttctccataatgtatatatatcttttattttgtttacaaaggacaactagcagggtcctcaaaagattaaaactccatttgttaggaattatatatttttagcataattgcagtaatttcagagttgcctagatgcaagcttttggtaattcaaatttttctttaataataaagtatatttaca

SEQ ID NO: 303 - DNA, 488 bp, Leptinotarsa decemlineata
  source 1..488: mol_type = genomic DNA
atggtcggtatgggacaaaaggactcatacgtaggagatgaagcccaaagcaaaagaggtatcctcaccctgaaataccccatcgaacacggtatcatcaccaactgggatgacatggaaaagatctggcaccacaccttctacaacgaactccgtgtcgctccagaagaacacccagtccttctcactgaagctccactcaaccccaaagccaacagggagaagatgacccaaatcatgtttgagaccttcaacacacccgccatgtatgtagccatccaagctgtactctccttgtacgcttctggtcgtaccaccggtatcgtcttggactctggagatggtgtcacccacaccgtaccaatctacgaaggttacgctcttccccacgccatcctccgtttggacttggctggacgtgacttgaccgactacctcatgaaaatcctcaccgagaggggttactcattcaccaccacagctgaaag

SEQ ID NO: 304 - DNA, 2472 bp, Leptinotarsa decemlineata
  source 1..2472: mol_type = genomic DNA
gtcagctgactgtcttgtgacaaatttacttgcttggttaaaagttgatagtccgtcgtcttgcgagttgtgaattgactgggtgaggttgaaagtgatacaagtctacattcataatgtcgagattaattgctgatgaggaacaggaatcacagtatggatatgtccatgctgtatctggaccagtcgttacggccgagaaaatgtcaggatcagctatgtacgaattggttcgagtaggatactatgagttagtaggcgaaattatccgtctggaaggtgatatggccaccattcaggtatatgaagaaacttctggagtaacggtgggagatcctgtgttgcgtaccggtaaacctctatctgtggaacttgggccaggtattatgggttccatctttgatggtatccaacgtccgctgaaagacatctgcgacatgacggaaagtatctacattcccaagggtgtgaatgtgccttcactctccagaactatcaaatgggaattcaacccaatcaacatcaagttgggatcccacttgacaggtggagatatttatggtatggtccacgaaaacacccttgttaagcacaaaatgatcctcccaccaaaatctaagggaacagttacatacgtggcagaaccaggaaactatactgttgatgaagttgtattggaaactgagtttgatggagaaaggtctaaatacactatgttacaagtctggccagttcgacaggcaagacctgttagtgaaaaactcccagctaatcacccgcttctcacaggacagcgtgtattggactctcttttcccatgtgtgcaaggaggaaccactgctattcccggtgctttcggttgtggtaaaactgtaatttcccagtcactttccaagtattccaactctgatgtcattgtgtatgtaggttgtggagagagaggtaatgagatgtctgaagtattgagagatttccctgaactgactgtggaaattggtggtgagaccgaatctatcatgaaacgtaccgccttggttgcaaacacctccaacatgcctgtcgctgcccgtgaggcttctatttatactggtattaccctgtctgaatatttccgtgatatgggttacaacgtttccatgatggctgactctacatcacgttgggctgaagctttgagagaaatttcaggacgtttggctgaaatgcctgctgattctggttacccagcctacttgggtgctcgtcttgcctctttctatgaacgtgctggtcgcgtcaaatgtttgggtaaccctgacagagaaggatcggtttctatcgtaggagcagtatctccacccggtggtgacttctcagatcccgttacttcagcaactttaggtatcgtacaagtgttctggggtttggataaaaaacttgcccagcgtaaacatttcccatctattaactggctcatttcttattcgaaatacatgagggctctggacgatttttatgacaagaacttcccagaattcgtatcactcagaaccaaagtcaaggaaattctccaggaagaagaggacctctcagaaattgtgcaactggttggtaaagcctctttagccgaagcagacaaaatcacccttgaaatcgccaaactgttgaaagaagacttcctccaacaaaactcctactcctcctacgacagattctgcccgttctacaaaacggtaggcatgctcaagaacatgatcggactgtacgacatgtcgagacacgctgtagaaacgaccgcccaatctgaaaacaaaataacctggaacgtaatcagagactccatgagcaacatcctctatcagctcagcagtatgaagttcaaggaccccgtcaaagacggagaagccaaaattaaagcagacttcgaccagctctatgaagacatccaacaggccttcagaaacttggaggattaagtgggggtcgcgtaggactgtgcagcttggggttttaggtttcgaagatgtttctctggaactgcacttggtcactatcagaaggcctctgtccctcactctgggtattgtcaaccagcggaagtagtaataatggggttttcccttttgatattatcatgtataataataaatcatgtaaatttttcgagtatgtgtatagtttttgagatttcttggtgagggtaagtgttgaaaactataatttttcccatcattccagttacttttaagtttgattttttttttcattgaaataggtgcttatcagttgtccagtattatcgatttcattgaactgtggccattttcgaaatcatttacacattttaaagctgttgtacattatatttacctttttaaagatatatcttactattgtacagtttaccatgtatccaatgtctagaggtttagaacttttgattgtagtgctattgttctgttttgaacgataataaacatacatactgttgtt

SEQ ID NO: 305 - DNA, 1686 bp, Plutella xylostella
  source 1..1686: mol_type = genomic DNA
atggcagcagtagcagcagcccagaagaaccgcgagatgttcgccatcaagaagtcctacagcatcgagaacgggtacccgtctcgtcgccgttcgctggtggacgacgctcgcttcgagaccctggtagtcaagcagaccaagcaaagcgttttggaggaggcccgtgcccgcgccaatgactctggcttggattccgaacttatccaagacgatgtcctgattggcaccggcgctgtcactccaactgttgaggtgggcactcagcaggacgacactaaagatggtcaactcgccgatgcggaggtcggtggaatagacggaaatgcagatgacgattacaccttgaccgaggaggaggtgatcttgcagaactccgccagcgagtccccggaggccgagcaggcgctgcaacaagcggctttgcttctgcgcctgcgcgacggcatgggctcgctcgcgcgcatcctcaagaccatcgacaactacaagggctgcgttcaacacctcgagacccgcccctccaacgccaacgacatccagttcgatgctctcatcaaagtgagcatgtctcgcggcaacctgctccaactcatccgatctctccgccagtccaccgccttcgccggcgtcgacctcatctccgacaacgtctccagcaagaccccgtggttccctcgccacgcttccgacctcgacaactgcaaccacctgatgaccaagtacgagcccgagctcgacatgaaccaccccggcttcgcggacaaggagtaccgcgcgcgcaggaagaccatcgccgagatcgccttcggctacaagtacggcgacccgatcccgcatatcgtgtacacggagaccgagaacaacacgtggtcgcgcgtgttcaacacggtgctggacctgatgcccaagcacgcgtgccgcgagtacaaggcggcgttcagcaagctgcagggggacgacatcttcgtgcctcaccgcatcccgcagctggaggaagtgagcaacttcctgcgcaagcacacgggcttcacgctgcgcccggccgccggcctgctcacggcgcgcgacttcctcgcctcgctcgccttccgcgtgttccagtccacgcagtacgtgcgccacaacaactcgcccttccacacccccgagcctgactgcatccacgaactcctcggccacatccctctgttggccgacgccagcttcgcccagttctctcaggagatcggtctcgcttctttgggagcctctgacgctgaaatcgaaaaactgtctaccgtgtactggtttacggtggagtttggtctctgcaaggagaaccagcaactgaaggcttacggcgccgctctcctgtcttccatcggggagctccttcacgcgctgagtgacaagcccgagctgaggtccttcgagcccgcgtccacctccgtgcagccctaccaggaccaggagtaccagcccatttactacgtcgctgagagcttcgaagatgccaaagacaaattcagacgctgggtgtcaaccatgtctcggccgttcgaggtgcgcttcaacccgcacacagagcgtgtggaagtgctggactccgtggagcagctcgagaccctcatctcccagctcaacaccgagatgctccacctcaccaacgccgtcaagaagctcaagggctcccacttcgagtga

SEQ ID NO: 306 - DNA, 1044 bp, Diuraphis noxia
  source 1..1044: mol_type = genomic DNA
cagaagattgttcaaacacatatatcgtcgtttcgttctggataccgattattcacaacatgggaagttacaaattatacctggccgtcatagcaatagcttgcatagctgcagtacaggaagctagttgctctgatgagcaggtacagtacgatgatgrggaagaagtgatcggattagagaaagagcaggaagaagtgtccgaaccagatatggaggaaaaagaagagccagaatcagagatggagtaccatcagtgcgaggaatacaaatcgaagatttgggacaatgcatttagtaataaggatgctatggacatgatgaaactgacgtttataacagctgagaaaatgggctccgacgccgtgtgcactgacacagcccgggccttcataaacttcatcgaagtgatggccaccaacagtaactcccaatacacgagaagtatgttcaaaaagttggtggcgtttattgttagagagttgaacacgacgtcggacaatttcagagagacgtcggaggtgttcgaacgtatctggacaactccagagattcgtgactttatcagggactcagtcactcggaccaataacgtgctcaaggagccccgtatgagaagccgactgttcaaagtgattgaagcagctatggatctgatgtcgaaatccaaagacggagaatcaatgaaacagaagtttaaggggatgtacagagctcccaccaagatggcaaggagtgccatggataaggttggaaatttctttcgaaaactttaataagaatgtccatacagactagtgatatatatatatatatatatatatatagcatatacatatagataaacataaagtgcagattttctaaaaaaaaatgttaacctaaaatctcacttccccgcctctctgagagtcgtcttcagtgttttgtacagtatcattacacattcggtatatctaacataccacacaccgcgttgttcttgcaataaatattgttattgttattattttattttgttctaaataaactcaattgattaac

SEQ ID NO: 307 - DNA, 3085 bp, Acyrthosiphon pisum
  source 1..3085: mol_type = genomic DNA
tgaacctgcaataatcgccgccaccgacgcgacgtacagaccggtccgtgcagtgtcccttagttgtacttgtgcgctttttgtgtgtcggtcacgtgcggatttcgcacaaacgttttgattttttcacatcgtatatctgttattgtctccacgcaataattattgcactcgccgcagtgttgcatccattcagtagaaacaatattggcacctattttatagaggctcgcgccgttcgtatttatagttattataaatatagtgcccgaacgacttcgggctcgtccgactttcgtggattttatatcattaatttttttatcgtcgtcgaaatgctgttaatcttgaatagtgatccgttgtcgtatccgtcaccgatccatgtgtcgacgatttaaatctagaagaaattcgtccaccacggtgtccaagacctcacactcactatttaccagccggctcgacctacaaatgacttattgttgatcgatcatcagagaaaactcgcacgcttaaacaaaaaatgtttttggaaaacgaacaccagccaattattagccattcaccgtacgacctagcacgtccacttgaacaccatcaccatcatcacctcaaccatcacgccgcgtccaatcatcttcagtcgagcaccgaccacttgcaagaagattcggaaggccggagtacggctagctcgccgacgtccagttaccgcgacctgtccgggtgcgaagactttgatctgaaaatcccgaaaccgtctggtcacgggtctggcactggtggaaataacaacaacaataaccacaataacaacaacaacaaggaacaaaaaccgaaaaagcacaagtgcaaacactgtgggctggagtgcacagaaaaggtgcagtactggaagcacattcgcactcacataaaacctgaacagttgctggagtgcccaaactgtgagttcgccaccgacctgaaacaccactacgaataccacctgctgaaccacacgggtgccaagccgttcacgtgcccggactgcgactacaagtgcgtgagcaagtcgatgctccaatcacacctcaagtcgcattcgaacgtgttccagttccagtgttacgactgtggttacgcatctaagtacatgcacagcctcaagcagcacctgaagaagcgcgaccaccggccggccacgccgctcaacccagacggcacgccgaacccggacatcgtcatcgacgtggtgggcaaccgacgcgggccgcggcagaacaagaaacaaaaccggcacaacccgtatcagcaacagcaccagcagcaacagctccagcagtctatgacggtgtgttcgtcgcaggacgacggcggcagcagtagcggcggccacccatcaccgtactcgatgcaacagctgttgcagatgcctgcttccggatgcgcccaagttacgtatccgacctcggccgagtcgtttatgtattcgatgatcactaaacgctccatggagatggttgattaccaggccgccgaatacatggccatcaagaacaacaacaataataacaactcctcgtcggtcgatgataagatggaagtgcaacagcaccaccaacaatcactacaacaccaccacaacaatcatcaccataaacgcggccatcagtaccattcagatgacgtgctgaaagtggaattggctgggcgtagcggtagtggcggtgaactgacgcccgaaccacatgtacctgtgttggcggtcgccgatccttcgcccccgaccgtcgttttggccatcgagacgggaccgttgaacttaagcagagactcagtggctcctcgcgccgcgggcagcagccggcgtaaggggatcgcgtgcaaactcgagcgaccggcaaccgaatcgcagcctaagtcggtgtcggtgccggtggtggttgttccggtgtcgcctgcagtaccgatggattgcagtagcgagtcaagaggaatggtggaggagactttgattccggtaaaggaagaatatcaacagtaccaccactaccatcagcagcagcagcagcagcagcagacgtcgtcattgtcttcgacgcctgaaaaagaagacaaggaagacgagacgcatgtgtgccaccactgtgacataatattcaaggagaacatcatgtactcgatgcacatgggtttccacagcttcagggacccgttcgcgtgcaacctgtgtggcgagataacggcagataagttttcgtttttcgctcacatagcgcgcgtgccgcacagttaggctgcaattagaagacgcacctacgaaagatacgaaataataatagagtacaaattttaaaacaattaaccctttaggtatgtaatataggatttatcgtaagaaaaaattaaaacagattaagaatataaagtaatgttacataggtactatattatacatctctttctttttaataactgtcccccccaaacctaagagtgtagttacgccgcacccatgcttcgtacaaatgaaaatcgtttttggcgcttagctaaaaacgattttaatttgtatacctacgcggccggtgttgttgaacggttccggttcttaaacgttgatttcaacttatcaacgtgtaagagtcggcaccgtgtcttcaaatcgtgattgcgcacattaatcgtcgagatgcttagttgtttatcgttttaaatatttttttctcgttatatttttctcggaaataaaattttaattatgttttaattttattttcgaggaataaaagccatcgccaattttagcgatttaaaaatgtttaactcgtgtcctcatagttaagcacaaattattagtttatttgttacatgtaaattttattatccttaaaaataacttttttaactttccaattacccaagattgaatcaataatgacaaatattgattttttttacgtttaaataccgtaatacctcatcttcttcattattttttattgtttgatctagtcgttaaactatttctcctcgtatactatagtttagtatcgtgtatacctatgcacttatgatagatactattaaaaataaaaaa

SEQ ID NO: 308 - DNA, 2383 bp, Botrytis cinerea
  source 1..2383: mol_type = genomic DNA
atgtcctataatcgattagatccggcgggccaaggccaagacgattattacaatatgaataatagacatcaatcgccgcaccctcaagggtaccaactagaagatgcgccatatggcagaccaaatactacttcacccggtcctggaatgcacaatctagagatacctatgggtcctggggcacatagaattggaacgccgagtgatcaattgcaagctcaaccatcttattcggtcgaacatttagatcaaaatcaataccatcagcgcatgtccctcaatcccagtcaaagctacgactcggaatattctttagatcctaacgcgcatcacgatgcttactaccaacctccataccaaccctctcctcatgaagaacaccctctacagaactatgccccagggcaagacccctacgcttacaatgatgatgatgaccatcaaccaattctacaatcgcatgaaccttatgggccagatccgcactcagctagtggcactgattacaaaggtggttatgacgggacggtacaatctccatcagcgacacctgtacctgcgttgagaagatacaagacggtcaaggaagtccaactgttcaatggaaatctcgtactcgattgtccgattcctcccaagcttttaaatcaagtcaatcatgcaccaccgccggagagagatgagttcacacatatgagatattcagccgcaacatgcgaccccagtgagttttttgaggagcgctttacattgcgacaaaaactctttgcaaagcctcgacacacagaactcttcatcgttgtcacaatgtataatgaagatgatgtattgtttgctagaacaatgcacggagtattcaagaacattgaatttatgtgcactcgtaaagacagtaaaacatggggcaaggatgcttggaagaagatcgtagtgtgtgtggtcagtgatggacgtgctaaaatcaatccaagaacaagggctgttttggctggtttgggggtttatcaggacggaattgcgaagcaacaagtcaatggcaaggacgtgacagcacatatctatgaatatacgactcaagtcggaatttctttgaaaaaggatattgttacactcacaccaaaacagcaacccgttcaattgcttttctgtttgaaggaaaagaatcagaaaaagatcaactctcacagatggttcttccaagcctttggtagagtacttgatcccaacatttgtgtactcctcgatgctggtacaaaaccaggaaaggactcaatttatcatctatggaaagctttcgatttggaaccacattgtgcaggagcttgtggtgagatcaaagctatgttgggcccaggaggaaagaatttggtcaatccattggttgctacccagaatttcgagtacaagatgagtaatattctggacaaacctcttgaatcggcatttgggttcatttcggtgttgccaggtgctttttctgcatatcgatatgtcgctttacaaaacgataaaactggaaatggaccactggagaagtactttgcaggagagaaaatgcatggagcaaacgcgggtatttttactgccaacatgtaccttgccgaagatcgtattttgtgtttcgaactggtatcaaagagaaattgtcactggatcttacaatacgtcaagtctgctactggagaaaccgatgtaccagatacaatggcggaacttattttgcaacgtcgaagatggcttaacggaagtttcttcgctgctatctatgctcttgctcatttctatcaaattttccgaagtgatcacagctttttacgaaaaatcatgtttttgattgaattcacatatcaaactattaacatgatcttcgcttggttcgctcttggtaatttcttcttggtttttcacatcttgactacatctctcggaagttctgacttactgggtaacgttggtgtaattcttggtgttgttttcgaatggctttacttgtttacgcttttgacctgttttattctggcgctgggaaatcgacctcaaggaacgaacaaagtttatatgtctatggtttatttctggatcattatcatgatatacctaatgtttgcttcgattttcatcacagttaaatcaatccaaactcaacttgctaaagacgaattcaactggacggatattatcaagaatcagatcttctatactctgatcatttctctcgcctcaacttatctactctggttcatttcttcctttttattcttcgacccatggcacatgtttacatctttccttcaataccttcttctcactccacatatatcaatattctcaacgtttacgcttttctgtaacactcacgatattacatggggcacgaagggaa

SEQ ID NO: 309 - DNA, 2736 bp, Botrytis cinerea
  source 1..2736: mol_type = genomic DNA
atggcgtactctggaaacggaggctatgatgagcataagctccaagaccttccacctggagggggcaactaccatcaccctcaagatgaagaggaaggagctttacctttactcgattctggaggacatggcggcccattcaacagcccttacgactctcactcccaaggaggccttcgagcgaatactcctccagtcagacctgtttctgcctacagtcttacagaaacgtatgcgaacgatccacaaccatacagcagcgattacaactcatcccacacatacaatgagcagttagaagataacccatacccacaaaccgacactcctttgtcaagagccgggactacctccacagaggcatggagacaacgacaagcccctcaggctggaggtctcaaacgttatgctacaagaaaggttaagcttgtccagggaagcgtcttgagtgtcgatcatccagtacccagtgctatcaaaaatgcaattcagcaaaaatacagaaatgatttggagggtggcagcgaggaattcacacatatgcgttacaccgctgcaacttgcgatcccgatgaatttactctgaaaaatggttacaatctacgacctgccatgtacaatcgtcatactgagttgctcattgccgttacctattacaacgaagacaagcagttgactgcacgtactcttcacggtgtcatgcaaaacatccgtgatattgtcaacctcaagaaatctgatttctggaatgtcggcggaccagcatggcaaaaaattgttgtctgccttgtttttgatggtatcgatccttgcgacaaagacacactcgatgttcttgctacaattggtatctaccaagatggtgtcatgaagaaagatgttgatggaaaggagactgttgctcacgttttcgagtacacaacacaactttcggttactgccagtcaacaacttatccgcccaaccgagggtgatgccaactgtcttcctccggtgcaaatgatgttttgcttgaaggcaaagaacacaaagaagattaattcccatagatggctgttcaatgcatttggtcgtctccttaaccccgaagtttgcatccttttggatgccggtacgaagccaggacctaaatcgttgttgtctttgtgggaaggtttctacaacgacaaagatctaggaggtgcttgtggagagattcacgctatgttaggaaagggaggcaaaaagcttctgaacccgcttgttgcaggtcaaaacttcgagtataagatcagtaacattcttgacaagcctctagagagttctttcggatatgtcagtgtgttgccgggagctttctctgcataccgattccgagctattatgggacggcctcttgaacaatacttccacggagatcacactttgtccaagattcttggaaagaagggtatcgagggaatgaacattttcaagaagaacatgttcttggccgaggacagaattctctgtttcgagcttgtagccaaggctggtagcaagtggcatttgacttatatcaaggcagctaaaggagaaactgatgtacctgaaggagctgctgaattcattggtcaacgtagaagatggcttaacggttcctttgcagcaggaatgtattccatcatgcatttcggcagaatgtacaagagtggtcacaatattgtccgcatgttcttcttgcacattcaattcttatacaacgtcttctccaactttctcagttggttcatgttatcttctttctggctcactactactgttattatggatcttgtcggtacccctactgctgcttcggacactactgcccttcaccatggctggcctttcggtgatactgctacccccatcatcaacacgattctgaaatatctctacttgggattcctactcgttcaattcattctggctcttggtaatcggcctaagggatccaaggctacttatattgtctcctttgtcgtttttggtgttatcaatctctacgtccttgttctatccatgtatctggtcgttcgtgctttctcgtcaggagatagtctcgatactagtagtgcgaaagatttctttgagagtttcttcggagatagttcgagttccggagctggtatcattattcttgctttagctgctacatttggattgtacttcgttgcatccttcatgtatatggatccatggcacatgttccattctttcggaccgtacttgttgctcatgtcatcttacatcaacattctcatggtgtacgctttcagtaattggcacgatgtttcttggggtaccaagggatctgataaagcagaagctcttccgtcagctaaaactacgaaggttgatggtaaagcagcagtcattgaagaaatcgacagaccgcaagaggatattgatagtcagtttgaggcaactgtcaagcgtgctcttagtccatttgttcctgaagttgaagatgagagtaagaccttggaagattcttacaaatctttcagaaccaagcttttgatctcttgggtattctcaaacgcgttgttggctgttgctatcactagtgacagtgttgatggatttggtttcggaaatactgcatcaataagaactgctaagtttttcgaaattttgctttactcaacggctttcttggcacttattcgattcctcggatgttcttacttcttgttcaagtctggtatcatgtgctgcttcatgagacgttaa

SEQ ID NO: 310 - DNA, 2715 bp, Botrytis cinerea
  source 1..2715: mol_type = genomic DNA
atggaaacatcaaggagctggaatagttcggctgaaaactatcctatgaatgaacttattcaacattcaaacaattctgttactgatcctgctacacagttagataacactgatcatattagtgatgtacatcactcaaatgatgctcatgatgttggtgaaagtttgctatcagatactagtggctaccatccaacaacaccctatgtgactggtactgggcaggtacaacgtcaacgttcaccaaccagctcagtgaacggtgaggaatttttcggggatcaacaccatcttccagatatcgaccaggacttctacagaagccccgaagactcctttaatgcgcaagacatgccgtccgcgaacggtgctcgtggagctcttcggcgccgcgctactcgaaagattaaactgattcaaggcggtcagggatctgtcttgagcgcaaactaccctgtaccaagtgcaatcaagaatgcattacagccccagtacagagatatagagaatggtaccagcgagttctcagagatgcgatacaccgcggtaacttgcgacccgaatgattttaccttgatgaacggttatacactacgccagcacatatacaaccggcacaccgagcttttgattgcaatcacctactataatgaggacaaggtgctattcgctagaaccttgcatggtgtgatgaagaacattcgcgatattgtgaatctgaagaagtccaggttttggacgcagggttccgcagcatgggagaaaattgtcgtctgcctagtgttcgacggtttcgaaaaggcggatccaggtgtgctcgatctcctcacaaccgttggagtatatcaagacggcgtgcgaaaacaggatgtggatggaaaggagacgacagcccatgtcttcgagttcacgacacagttatccatcactcccgacctacagctttctcgtcccaattcggatgtggatgattccagtaacttgcctccagtacagctcctcttctgtctcaaacaaaagaataccaaaaaaatcaactcgcatcgttggttgttcaatgcctttggacggattctcaacccggaagtcaccattttgatcgacgcgggaacaaaacctggacctcgctctttattggccttatgggaggcattctataacgacaagaaccttggtggcgcatgtggtgagatccacgctatgcttgggagccggaactccaagttactaaatccgcttgtggcaatacagaatttcgaatacaagatttcgaatgttcttgacaaaccccttgagagctccttcggctacgtcactgttctccccggcgcattttcagcatatcgctttcgagcgatcatgggccgtcccttggagcaatattctcacggcgaccatacgttgttgtctggcaagaaaagtatcaacaacatgaatatttttaaggagaatatgttccttgcagaagatcgtatcctttgtttcgagctagtagtgaaagaaggacagaattggcacttgtcttatgtcaaagctgccaagggcgagacagacgtaccggaaggccctgctgagtttctcagccaacgccgccgttggctgaatggatcatttgcggcctcgctatactcgcttattcacttcggtcgcatgtacaaatccgggcacagtctgctccggatgataatgtttcatttccagctgctatacaacattgccaatgttatttttagttggttctctttatcatcctattggctcactaccactgtcatcatggatcttgtcggtacacctgtaactgcatcgaactatcacggctggccgtttggcgatactgcgtcccccatattcaaccacgttattgaatatatttaccttgcgtttgtgatcacacaattcattctggcccttggaaatcggccaaagggatcgcaagtgacctatctggtgttgttcgtggtgtttggatttattcagctctacatcatcattctgtcattctatctggtttaccgggcactacggactcccattggggaacagatcgacacgtcttcggccgcagcattctttgagagcatgtttggaggaacgggagtcgccggcgtgattttactagccttggtcaccatttacggcttgaactatgttgcctcgttcctctacttggatccttggcatatgtttcactccttcccgcagtatatcattctcgcttcgacatatattaacattttgatggtgtatgccttcaataactggcatgatgtttcttggggcacaaagggctcagatgaaagcgaaaagctcccttcggccaatgtgatcaaagactcgaaatccggtgtcgagatggtcgaagaagaggagatgcaacaaacagatattgaccagaagtttcaggagaccgtgctaagaactctggcccctgtcgaagtggaagttaccgtagaaaccaaggaggtcgatgacacgtataagtcgtttaggacccgcttggttgtctgctggatcctgtcgaatatgctgctggtcgggattgtcacctcggatgatttcgcatttcttggcgttggtcctctacgacccggaccgccatactacttcaaatttcttctatatgccactgctttcttgtcgattatcagattcttagggtttctttggtttctcggacgaacaaacattatgtactgctttgcgaagaggtaa

SEQ ID NO: 311 - DNA, 4648 bp, Botrytis cinerea
  source 1..4648: mol_type = genomic DNA
aaaccttccttccgagccaggatatcgagctttcgacgtcttctactacctcctcacatctgcatcgactcctgccgaacgagaattcttgagcttaaagcaagcttctagttacgcgcttctagaaaagtctggaacatatggccctccaccgtaccttcctactgcggatgatgctgctgctgcagacgacttcagagcatcattaaaagctattggtatcaagggtgccgcacacagagatctcatctcaatattagcaggattactaaagctaggtgataccttgagctttgttcttgatggggatgcgttggaggaaatttgtgaggatgttggaggtctgcttggtttggaacccgatgttctcgtcaagcaatgcacaacccaagagcgagaaactttgatcggtggtctctatgaagcccttgtagattgggtaattctgaaggccaacgaagccattgctagtgagatgctcaggatcaaggacggtgattcttccagtgaagggggaccaggagctcgaaccccaaatacagaagacgacaatggtgatactgtctgcataactgttcttgagattccagacccaaatcctgggaaagcggctgcagtgcgaggtgtctttgacgatactcagggtattaattccgaaatgaaagaagatggtgtggatgtagtttctgctggctcaacggttatccgagagatgcaaaatgctgtatccgaagttgctccagatctcggtatcatgactggaccttctgggagagatcgtgaacacgagcttgagaagcgtgagatcgtattagagaaggttgcccgcgagggagaagatgatggtttcctcaagaagcttctgctcccaatcgagggtcaaggtattaacctaggccgcaacggtcgtattgacctaccttccgttcttggtagcagtcgcgtctggtatcacttatctatgcatccgaccgacgattcacccgcagctctcgcttcgcttccttcaacaacttcggcttggtccgcgggtgctatctcacgccaactccgcgcctggcgtttgccagagtgggcaaatcgacgaaacaaaaacttggattttacagccgatttcgatttcgaagaatttgttcaacgatatgccccccttggttgtaaggatggccgtgatggcattgaaagctgggtcatggagcgtggttggagcaatggtgaagttgtcataggcaaagagcgaatatggatccgcgaaagtgcttggtgggaagctgaaaccatgcttgacctaaagccggccgaaggggagttccaaagtatgggcggtcctggaggcatggcaggcatgctaggagcccacgacatgaacacaggatactcctccaacccaccaaatggaagtggtttctttgccggtcccaataatgatctgacgcctcttgggagtcacgataatatgatgaatcgacaaagtcaagtcaacgtggcccggagtaacctcggggctcccaccatcgcaccatcaagaaatatcagtggtggtgactatggactcggcttcaagggagataatacgaggggccaggtttattacactgatgagaatggagaaatggtggatgatcccgaaggtggcaccccgaaagctgtcgtcagcgaggcagcaacaaaccagcgtcgtatctgggccgccattacctgggctttcacgtggtggattccttcattcctcctctcatttattggtcggatgaaacgaccggatgtacgcatggcttggagagaaaagctagtgttgtgtttctttatcctcttcatcaatgccttggttattttctggattattgaatttggtaaactcctctgtccaaattccgataaagcgtggaatgcaaaagaagtcgctactcatcaaggagataacgatttttgggtcagcattcatggaaaagtatacgatctttccaagttttggaagttgcagcacagtgataccactgtcgagacaacctctgatgttatgcaaccatttgctggtttgaacttggacagttacttcccgccaccattgactgttgcatgccctggccttgtaaccgattacaccgtggttttactggacaatagtactgttgaatatccttccggggtccatacatctggcaacctttcagcatatacaaccagtaaactttacgactggaattggtatgcggacgtgtacacacctgcaatcaaagagtattaccatggtgatctagtggtcaagaatagtgcgatcaagagtgaaggccaaaatgaaaatcattattgggttatatcacgagtgatggatgacaattacaaaacagccaacgcatcttatcaagtggatatcctcaacaacttgaattgcatgaacaatttgttctatgcaggcatccctgattttcgagattctattagatgtcagatcaacaactacatccttctcgctttcacaattattgtgtgtgctgtcattgtcgtcaagttcgtgtctgcacttcaatttggttcgaagcgtcgtccaactcctcaagacaagttcgtcatttgccaagttccagcatacaccgaaggtgaagactcattgcgtaaagctttggactctgttaccgctctacaatacgacaataaaaggaagctcatctgtgtcgtttgtgatggcatggttgtaggaggtggtaatgatcgccctacaccaaagattatcctcgatattctcggtgtagatcccaagatcgaccctccagccttaccgtttaaatccgtcggagatggcaacgagcaactcaactatggtaaggtatactcaggtctatacgaatttgaaggaaatgtggtaccatatattgtagtggtcaaggttggcaaggaatccgagcaatccaaatcgaagcccggtaatcgtggaaaacgtgacactcaaattattctcatgagtttcctcaatcgcgtccatcacagagcacccatgaacccattggagttggaaatgttccatcaaatcaacaacattattggcgtagatccagaactttacgaatatctactgatgattgatgccgataccagtgtaagggaagactcgctgaatcgtctcgttgctgcctgtgtcaatgacggtaaaatcgctggtatttgtggcgaaaccaatcttgaaaacgaagagcaatcttggtggactatgattcaagtttacgaatatttcatctcgcatcatttggccaaggcctttgaatctctattcgggagtgtcacttgtttacctggttgttccactatgtatcgtctacgtaccgctgacaaaggcaaaccattgattatcgctgatgccatcattgacgagtacagtgagtgtgttgttgatactttacacaagaagaatcttctgtctcttggagaggatcgattcttgactacgttgatgaccaagcacttcccatacatgaagtacaagtttattccagatgcatacgctagtactgccgcacccgaaacctggagtgttcttctttctcagagaagacgttggatcaattccaccattcacaatctagctgagttggtccgacttcctgaactgtgtggattctgttgtttcagtatgagattcgtcgtcttcatcgatctgttcggtacaattattcttcctgcaactacagtctatctaggatatctgatctacaaagtcgcaacgcatcaaggtcaattccctctcatttcgatttgtatgattgctggtacatacggtttacaagctttgatatttattctcaaacgtcaatggcaacacattggatggatgattatttatatccttgcattcccaatttactctttcattttgccaatctactcattctggaatcaggataacttctcgtggggtaacacacgtattgtcctgggagaaaagggagctgcaaaggttgtggccgtggacggcgctgaatttgacccaagaagcattcctcttcagcgatgggacgattacgcctcacacaacaaccttccaggacgtcgtggagtaccagtcgaaaaggcatacgatacattcgatgatcaatacgaaatggatgacatgaaatccatgtactcatctgtcaagccagcctccactattttaactggtttccctggtcgcggtccatacatgcctcctcaatctacttactccgcaaaccaatacactgaccaccctgtccgcaatcattctgcaatgtcccttcgccaacaagatcgttccgcctcaccatatcaagactaccctggcaacaatcgtccttcgatgcaaatgatgtcttcggataatcttctcggtggtggtccaggacgacatcaatcacgctcgtcggtaggcttcacaggtggtgctcgttcaccattagcaggagctggtattgatagacctgctagtggatttgatttccaaaggggtaccgccggtccagatgatttgcagattgtagaggctattcaaaactgcttgagggaggtagatctagataatgttacgaagaaacaggttagagctttggtagagcagaggttgcagacagagttggttggtgagaggaggacatttttggacaggagtattgattctgagttggctgctatgtaa

SEQ ID NO: 312 - DNA, 259 bp, Botrytis cinerea
  source 1..259: mol_type = genomic DNA
catttcggaggcggtcgaaactcgccggtttcatgcgtgcctctcacttcttcagtgaagctcgaaggaaccacgcttgaccaagttaatatgttcaccctatgtctatttcaggatgtgttcagcaaagcttacaaatcgaatcctgatagtatgccgtactttttggttcctatcaattgtccaaatcacactggggactggaaagattatgagcccatgtcaataattgattgggaaactgttcaatatgtccaag

SEQ ID NO: 313 - DNA, 200 bp, Botrytis fragariae
  source 1..200: mol_type = genomic DNA
gcatggcaagaggcagaacataatcctggaattgttcgtacatctattatgagcctcgatgatttaaagattgagctctgccttccgatcgagccaccaccaattccgcccttgacacttcactggaattccagcacagagctgtctgtcgagtttacaaacgatgccgaaataggaaccaccgaggacatgatattacg

SEQ ID NO: 314 - DNA, 210 bp, Botrytis cinerea
  source 1..210: mol_type = genomic DNA
agaagcagattgttattttggccatctcaccatcatcgcagatggatatgcctccaaattccgcaagcaatacatcaacaaaactcccattgtcaaaagtaaattctacgctctagaattaatagattgtcccatgccagctcccaatcatggaatcgtagtcctctcggacgtctccccagttctcctctatcaaatcggtacccacga

SEQ ID NO: 315 - DNA, 254 bp, Botrytis cinerea
  source 1..254: mol_type = genomic DNA
gcgaagttgatggagcaaaagaagttcatgaaaattggcttgtctacagaagctttccgatcctacgtcccaatcatacaaatggaggtggaaaactttatgaagcgttcttcggcgttcaaaggtccaaagggaactgctgacattggtcccgctatggctgaaatcaccatctacactgcttcgcacactctgcaaggaaaggaagtccgcgatcgattcgatacctcctttgcctctctctaccacgacct

SEQ ID NO: 316 - DNA, 209 bp, Botrytis cinerea
  source 1..209: mol_type = genomic DNA
ttcaacgctgtcaactgggtagaatcatctgcatgggatggaagagacgccattgtcgttgctggagatattgctctatatgccaagggtgctgcacgtccaactggaggtgctggagctgttgccatgttgattggaccaaatgctccagttgttgtcgagcctggtcttcgcggatcctacatgcaacatgcctacgatttctacaa

SEQ ID NO: 317 - DNA, 186 bp, Botrytis cinerea
  source 1..186: mol_type = genomic DNA
gtctggctaagcctagtcaattgaatgcgttcattcgttatagttcacagcagactgaaagtcatgatacgttaacagagacaactcgaaatattggcatcatagctcatatcgatgcaggcaaaactacaactactgagcgtatgctctattacagtggctatactcgacgcataggagacgttg

SEQ ID NO: 318 - DNA, 1610 bp, Fusarium oxysporum
  source 1..1610: mol_type = genomic DNA
atgggttttaatccgcaaggccaaggcaacggcccaaactatgatgcgccacgggaaatgcaagatttaccagctggccaagcttaccactttcgcgaatctgacgaaacagccgccgctcgtgtttctcctgtgagcaatccttacgaaccagactatgatcaattgtcccctccccctccgctgggcgcacaacgacccgtgcccgagcagaatgagtcgagccgcgatcttctacacagttcataccaaggcagcgtaggccataacagctttgacggccatagttttggtcacaatagctatggacctggtgcttttgggcattatcctgctgaccagcacggtcgcatgcctgggtctccgggctacgaatacccagagcctgagtacgatgtcgaagcttcgcgtttggcagaatctcgtctctccgtcatgcatcgcgcccctacgatgcaagattggggtcagaatggcgaggctctgtctgttccagactttgcccacggacgccccgactcaacgtaccaggagttcgatgtcgacgagagctggatgatgcgacagcagcagaaccaactcgcaggtggtctcggtcgctcaaagacccgtaaagtcaagctcgttcagggctccgttctcagcatcgattaccccgtgcccagcgccatcaaaaacgccgttgaaccgcgataccgaagcggtcccggaagcatggaggaggagttcacaaagatgcgctacacagctgctacatgcgaccccaacgatttcaccctgcgaaacggctttaacctccgccccaagatgtacaaccgtcatacagaactgctcatcgccatcacctattacaacgaggacaaggtgctacttgcgcgtaccctccacggaacgatgcagaacattcgggacattgtgaacctcaaacgctccaagttctggaacaagggcggtcctgcgtggcagaagatcgtcgtttgtctcgtctttgatggtatcgacaaggtcgacaagaacgttttcgacgtgctcgcgacggttggtatctatcaagatggtgttctcaaaaaggatgtcaatggcaaagaaaccgtcgcccatattttcgagtacaccagccaagtctccgtgacacccgatcaacagctcgtccgtcccgatcccgacaagcctcatcgcaatctcccccccgtccagtttatcttctgtctcaagcagaagaacagcaagaagatcaattcgcatcgctggctcttcaatgcctttggccgcattcttaacccggaggtcgccatcctcattgatgccggaacgaagccggccccccgcgccctgctgtccctctgggagggcttctacaacgatcgtgatctcggcggcgcctgtggagagatccatgtcatgcttggcaagggtggaaagatgcttctcaatccactcgtcgcggtgcagaatttcgagtataagatctccaacgtcctcgataaaccgctcgaaagtgcctttggatatgttagtgttttgcctggtgctttctcggcgtatcgcttccgcgctatcatgggtagacctctggagcagtactttcacggcgaccatacgctctccaa

SEQ ID NO: 319 - DNA, 4677 bp, Fusarium graminearum
  source 1..4677: mol_type = genomic DNA
atggcgagacgaatgtccatgtattcgatggcctccgaggctatgggcggtcctcaagctccccagcagatgtctaccacgactctcctgaatgccatccacaacatctacctgtcttctcaaccttatcagatcgatgccggtactagtctggttgtcaacacatggctcacagctgctcaggctggtgctactgttgatgctaccctcgctgctcgagcctgggagcatgctaggcgtcgtgctgaagatggatgtgttgttttaggttcactccaccaggcaactccctcgcttctcgtgccgttcctgaacactttcccgttcgccattcccgcatccatttacaagtcattggaggctgtacaaccgtttctccgatgtgtcactccatacaacgcttcggcccctcgacagatcgcactcggcgttacactgacattgagtttgggaggaagtgtcacaggagcctctctggccttgtctcaaggtggaatcgatactgagaatggattgctcaacgttcctgccgaggctggataccgtgcttttgacgttttctactatttgctcacatccgcctcgacacccgcggagcgagagtttctaggcctcaaggcgccttcagcgtatgctctccttgctcgctcgggtacttacgagcctccttcttacctcatcaccgccgatgatggtgccgctgccgacgactttcgccaggcactcaaggagattggtatcaagggatctgtccaccgtaacttcatctctaccttggctggacttctcaagcttggcaacactctcgactacgatgccgattccgacgatttcgaggagatctgcgaagatgtcagcggtcttcttggtatggagcccgaggttctcatgcaacagttgagcactgaggatcgacgaacacttgttgctggcttgtatgaggctctcgttgactgggtcatttccaaggccaacgctgccattgccgctcagatgctccgtatccgagatggcgatgagtctgttgatggtcgtggcgtccgcactccaaacgaaaacgaggatggtgacaccgtttccatcactgttgttgaagtccccgaacccgctctcggcagggctttggccatgcgaaccattttcgacgacactttgggcattaacgctgagatgattgaggatggtgtcgagatccaccctgcttcatcttctgttgttcgggagatgcagcaggccgttgccgatgtcgcgcccgatctgggcattatgactggtccccagggccgagaccgccagcatgatattgagaagcgagaagtcattttagagaaggctgcctacgcttctgaggaagacagcttcctgaagaagttgttgttccctgttgagggtcaaggcatcaacttgggccgaactggtcgtttcgatctaccaggtctcctgagctctagccgtgcctggtttcatctcgctctgcatcccacagacgattctcctgctaacttggctacccttcctgctatcacctctgcgtggtcagctggtaccatttcccgacagctccgttcttggcgtcttcctgaatgggccaaccgtcgtaacagaagtctcgactacacagctgattttgatgtagacgagttcgttggtcgttacggcgcactaggctgtaaggatggcaaggacggtatcgagacttggatgctcgagagaggctggagcaacggcgaagtctttattggcaaggagcgaatctgggtccgcgagggtccttggtgggaggcagagagcatgctcgacatcaagcctgctcacagtcttcaaagcataggtcaaaatccgttcacatccggttttgacacaagctactcagccaacccacccaatggcagcggcttcttccctgctcccgctatggacaacagcatgaatggcagcaatgaccagctcatgcatacccgtaatttcagccagggcaacatgagccaagccactttcaaccaacaccctcacttgaaccctcaatcagcaccttcgattgccccatctgctatgcgcaatgctcagcccgctaccggtgactacggtctcggtaacaagggcgacacctacaagggacaggtattctataacgatgatggagacttcactggtaagcttgatggagaccttgccaaggacaagaagatcgaaaccaagcccctgacctttggccgacgagcttgggttgcttttgtttgggccttgactttctggattccttcacctcttctcaagtttgttggacgcatgcgacgacctgatgtccgtatggcttggcgtgaaaagctcgtcttgttcttcattatcctccttcttaacggcttgattatcttttggattatcggtttcggaaagcttttgtgtcccaacgccaacaaggcatggaacgttaaggaggttgctggccatgcagaagatgaggatgctttctgggttgctatttttggcaaggtttacgatatcaccgacttctggcgacaacagcacagtgataccagcattaagaccaccaagacgaacatgttgcccctcgctggtatggttatggataactacttcatgcctcccctgaacagagcttgcagaggcctcggcatcaaggagactgttcaactcaccttcaacgagactataacgaaccctcttgcacagcatgtttctggtttctacactcgcgaccgtaccagtgctcttcacaacgctgactggttctggacgactttccagcccaagatcaaggaatactaccatggtgatctcgtttggaaagaaggcaccgttaagagccagggctcaggtagcgagcagcatccatgggtcatgtacggtaatcagatctacgatcttacggattatctgcacaccctagatgtcaacgacaacttcgatacctacaagttcttgaacgaggacatggtcaacttatggaagaacagccccggtaccaacatcaagaaggatcttgaccttctcatttccaacgcaaagaatgagactgtggccgccaaccttaagaacagttggcagtgcattcaaaacattgcgtacaagggtatcgtcgatttccgtgactcaccccgctgccgtgtcaacaactggctccttttggccttcgccattatcatctgtatcgtcaccgctgtcaagttccttgctgctctacagtttggttccaagcgacgtccttcgccccaggataagtttgtcatctgccaggtgcccgtctacactgagggtgaagattctcttcgaaaggcattggactcgttgacggctcttcagtacgacaacaagcgcaaacttatctgtgtcatctgtgatggtgtcgtcgtcggtgaaggcaacgatcgtcctacacccaagattgttctcgacattctcggtgttgatcccaaggttgatcctcctgcgcttcccttcaagtctgttggcaacagtgccgagcagctcaactacggtaaagtttactctggtctgtacgagtttgagggcaacgttgttccatatatcgttgtcgtcaaggttggcaaggagtctgaacagaccaagtctaagcctggtaaccgtggaaaacgtgactctcagattctccttatgagcttcctgaaccgtgtccatcatcgcgctcccatgtctcctctcgagcttgagatgttccatcaggtcaacaacattattggtgtggaccccgaattgtacgagtaccttcttatgattgatgccgatacctgcgttgaggaagacgccttgaaccgtcttgttgccgcctgtgcccacgacgcaaagattgctggtatttgtggtgaaaccgccctggagaacgatgaaaagacttggtggacaatgatccaagtttacgagtacttcatttctcatcatcttgccaaggcctttgagtctctcttcggcagtctaactcgtcccagtttcaccatgtaccgtcttcgaagtgttgacaagggcaagcccctgattatctctgatggtgtcattaaggattacagtgtttgcgacgtcgacaccctccacaagaagaaccttctgtctcttggtgaggatcgttatctcaccaccctgatgaccaagtacttccccgagatgtcctacaagtttatccctgatgctcagtgtaagactgctgcccctgaatcttggagtgttttgttgtctcaacgtcgacgatggatcaactcgaccatccacaacctggttgaacttatgcaactcaaggagctctgtggtttctgctgtttcagtatgcgcttcgttgtgtttattgatcttaccggtaccatcattctcccttcaaccaccgtctacattggttacctcatctacgtcttggctaccggcactggacccattccgtacatttctcttgctatgattggtgccgtttacggtcatcaggctctcatctttattctcaagagacagtggcaacacatcggatggatgattatctacatccttgctttccctatctactccttcattcttcccctctactccttctggaaccaggacaacttctcgtggggtaacactcgtatcgtcattggagagaagggtgacaagcaggtcgttgctgttgacgatgagggcttcgatcctcagtttgctggcgaaaggtag

SEQ ID NO: 320 - DNA, 6546 bp, Fusarium graminearum
  source 1..6546: mol_type = genomic DNA
gaactcaaaccaccaaaaaccaaccctcgcctctcccctttgctactctttgcattacgcattgccgacactcgttttacggcttcgtcaaatcactccgtctcgcccttttttgcgaccgagactacacaagccggtgaatcactttctcgtgattgattcgtctttttgaacttgaatcgacgccaaattacatctttttcgttggcctttcggaccagagtcacctctccctaagccatttgacgtttttgacgacaacatcttgcagtgccggtcacgcttgttcttccgcctgatcttgaatcacatcacgctcgttgatcatccacatgtgtatctctagataatctaataactcaacatgtcgggatatccgggcggtggtcaacgcgaccactatgacgatggctacggccaccctcagggaggcaaccaacagcaaggtggaaacacggattcctactatcaagacgatcaatactatgatcaaggctatgacaaccgcggccacaataataataacccgaataacaacagcaacaacaacaacgagggctactatgacgaatctggttattacaacgccgaccctaacaacccttatcaacatgacggaggctactacgacggccacgaccagtatcaagatggctattatgacaatggccagggtggatactacgaccaggactatgatcgtgggcaccaaggacagggtgcccgtcaaggctctgaggaagattccgaaacgttcagcgacttcaccatgaggtcggacatggctcgcgctgccgagatggattactacggccgcggggatgaacgttacaacagctacaatgacgggcagcgtggttatcgacctccctcctcccaaatctcttacggtgggaatcgctcgtctggcgcatcaaccccgaactatggtatggactatggcaatgctctacctcctggccagcgttcccgggaaccttatcctgcctggacttccgatgcacagattccgttgtcgaaggaggagatcgaggacatctttcttgacctttgttccaaatttggtttccagcgagacagcatgcggaacgtgtacgaccatctgatgatccttctcgactcccgagcctctcgaatgacgcccaaccaggctcttttatcccttcacgctgactacattggcggcgataacgctaattaccgcaagtggtacttcgccgctcatcttgaccttgacgatgccgtcggatttgccaacggtcttggaaagggtaggaagaagaagggtagcaagaagaagaagaaagacccagaggccagtgaagccgagactttacaggatctcgaaggtgacgaaagcctcgaggctgctgagtatcgttggaagacacgcatgaacaagatgtcccagcatgatcgaatccgacaaattgctctgtaccttctctgctggggcgaagccaaccaggttcgcttcatgccagagtgcttgtgttttatcttcaagtgtgccgatgattatctcaattcccctgcatgccaggctctcgttgagccggttgaggagttcaccttccttaacaatgtcatcacccctctctaccaatacttgagagatcaaggttacgaaatctctgatggtgtatacgttcgacgtgagcgtgaccacaagaacatcattggctatgacgattgtaaccagcttttttggtaccctgagggaatcgatcgcatcgtcctgcacgacaagagcaagcttgtggatgtgccaccagccgagagatatgtgaagctcaaggacgtgaactggaagaagtgcttcttcaagacttaccgcgagtcccgttcctggttccatcttctggttaattttaaccgcatctggatcattcatttgaccatgttctggttctacacctctcacaatgccccaagtatcctggttggtccaaaatacgaacagcagcttaaccaacagccctcaacagccaagtcattctctatcgtagggttcggtggtgctattgcttctcttattcaggttcttgccactctcgccgaatgggcctatgtgcctcgtcgatgggccggtgcccagcatcttaccaagaagctctttttcctgttgtttatcctggtactcaacatcgctcctggtattaaggtcttctttcttgagggtattggtggaaagaagatcgacactgccattggtatcgtccatttcgttatcgcattgattacgttcttattcttttccgttatgccacttggaggcctttttggcagttaccttgctaccaacaacaggaagtatgttgccagccaaaccttcactgctagctggcccacgctccgtggtaacgatatggcaatgtcctatggactctgggctgtcgtctttggcgtcaagatgggtgtttcatacatctacttgattctgtccttccgtgaccccattagatatctaagcatcatgaaggtcaactcttgccagggagacgctcttctttttggaaatcagctatgcagatggcatccaacaattgttctggcactgatggcattcactgacgttatcttcttcttcctggatacatacctttggtacgtccttctcaacaccgtcttctcggttgcccgatcattctacatcggatcttccatcttgacaccttggagaaacgtcttttcccgtcttcccaagcgtgtgtactccaagatcctcgccaccaccgacatggagatcaaatacaaacccaaggttctcatttctcaagtttggaacgccatcgtcatctccatgtatcgggagcatctcctcgctatcgagcatgtccagaagctattgtaccaccaggttccttccgagcaggagggcaagcgaactctgagggccccgaccttcttcatctcgcaggaagatcattctttcaagaccgaatatttccctgcttacagtgaagccgagcgtcgaatctcattctttgcccaatctctgtccacacctatcccggagcctttgcctgtcgacaacatgcccacgttcactgtcatgattcctcactacggcgagaagattcttctgtctcttcgtgaaatcattcgagaagatgaaccatactcacgagttacacttttggaatacctgaagcagcttcatcctcatgagtgggattgctttgtcaaggataccaagattctggcagatgagacctctcaattcaatggagaaaacgacaaggacgagaagaacactgccaagagtaagatcgatgatttgcctttctactgcatcggttttaagtcttctgcgcccgagtacaccctgcgcacccgtatctgggcatctcttcgtttccagactctctatcgtactatctctggcttcatgaactacagccgtgccatcaagcttctgtaccgcgttgaaaaccccgaggttgtccaaatgtttggtggtaatactgataagcttgagcgagagcttgagcgtatggcccgtcgtaaattcaagattgtggtttccatgcagagattctccaagttcaagaaggaagagatggaaaacgccgaattcttgcttcgcgcttatcccgacctacagattgcttatcttgacgaagagcccccagttgcggagggcgaagaacctcgtctgtactccgttctcatcgatggtcactctgaggtcatggagaacggcatgcgacgtcccaagttccgtgttcagctctctggtaaccccattctcggtgacggcaagtctgacaaccagaaccactctatcatcttctaccgtggtgaatacattcagctcatcgatgccaaccaagacaactatctagaggagtgtctcaagatccgaagtgtcctcgctgagttcgaggagatgaagaccgacaatgtctccccttatacccctggtgtcaagaacaatgtctcctcgcctgtcgctattctgggtgcccgtgagtacattttctccgagaacattggtattctaggtgatattgctgctggaaaggaacagacattcggtacactattcgctcgaactatggcacagattggtggcaagcttcattatggtcatcccgatttcctcaacggtatctttatgacgactcgaggtggtgtttcaaaggctcagaagggtcttcacttgaacgaagatatttacgctggtatgaccgctctcctccgtggaggacgtatcaagcaatgtgaatacttccaatgtggaaagggtcgtgatttgggtttcggctccgttctcaactttacaaccaagattggtactggtatgggtgaacaatttctgtctcgcgagtactattaccttggcactcagcttcctctggatcgcttcttgtccttctactacgcccatcctggtttccacttgaacaacatgtttatcatgttctcggtacagatgttcatgattaccatggtcaacctgggagccctccgtcatgagactgtggcctgcgagtacaaccgaaacgttcccatcaccgatcctctctaccccagcgggtgtgccaacactgatgcgcttacggattggatttaccgatgtatcgtgtcgattcttttcgttctgttcctctctttcattccccttattgtccaggaactttctgaacgtggcatttggcgtgctttcattcgattgatgaaacagttttgctcgttgtcgctcatgttcgaagtcttcgtctgtcagatctacgcgaactctgtacagcagaacatttcgttcggtggtgcgcgatatattggtacaggtcgtggtttcgccacggcgcgcattccctttggtgtcttatactctcgattcgctggaccagctatttacttcggcgctcgtttgctcttgatgcttctgttcgcgaccctcactgtctggaagggtgtcttgatttacttctggattacccttcttgcgctgacaatttcgcccttcctgtacaatccccatcaattcgcttggaccgactttttcatcgattaccgagattaccttcgttggttgtcgcgtggtaattcccgcagccacgcttcatcttggatctcgtactgtcgtctttctcgaactcgtcttacaggttacaaacgcaagacacttggagacccgtctgccaaagcatcagctgatgtccctcgagcccctttcgcaaacatctttttcagtgagattttctcgccattgatgcttgctgttgtaacgattctgccgtatctttttgtcaacgctcaaaccggtgttactaagcagagcaatccaaacttcagaggcaagatccaaccgacgcaatcgctaatgcgtctactcatcatcgcttttgcgcctgttgccgtcaatgcaggtgtcttggctgctatgttcggcatggcttgctgtatgggacctctcctcagtatgtgttgcaagaagtttggcagtgttctcgcagctattgcccatgccacagctgtgatcttccttcttatttccttcctgggcatgttcattctggagagctttaacttcacccgcactgtagcgggtatgatcgccgtggtctcgattcagcgcttctttgtgaagcttattgtttcgacctgtctcactcgtgagttcaagggcgacgcgtctaacatcgccttctggagcggaaagtggtactcgatgggatggcacacaatctctcagcctgctcgtgagttcctttgcaagatcaccgaactttccatgttctctgccgatttcgttcttggccactggcttctcttctttatggcgcccgtcatcttggtccccaagattgatactcttcactctatgatgctgttttggcttcgtcccagtcgccaaattcgaccccctatatactcgatgaaacagtccaagcttagaagaagacgtgtcatccgctatgccatcctctacttcaccctcctggtcgtattcatcgctctcgttgctggacctgctgtagttggtaaactcatgggcgaatcactcagcaagaccatcgaaaagatggttcctatgcagggtcttgtgcagcccaactatcttcacaacaacaacactaacagcaccttggcaactggtatcaagaaccctagttacaccggcgctggtctcacaatgactggcagcaagcgcgtccaggcctcggctactggcaagatcaagctgttttgagcgaaaaaagactgggagacagggtctgtctttttggacatttctcggacacagtcgtcgctctctgttcctatgcacagaagaaagttatcaaaatatgaagtttttgctttttcgtttttgcttttgcttttcagttcagtacctagcacaggtggatgcgtatgtacacattttgcattttatttagaagcggaagggtggtgagaggtggaaaggaggtcagcaacacaagccagacctgacctgacctggcattcactggttgaactgaagtggtctttttttgttggcacaaggcgcacctttttaacttattctaatgtgtacaatgaaaggaagcaaca

SEQ ID NO: 321 - DNA, 3504 bp, Fusarium graminearum
  source 1..3504: mol_type = genomic DNA
atgaacgacgatgacgcgattcacaacatccacaagaagatagagcgggaaaaggccctcatcaacgctgccaattctatgagggcacagacaaacaatgaagccgttagatcccgtctcgactcccagatgcgcgatggccgccgcaacctccagtttttcgaggagaagcttagggatattcagctgcgccgtgtgaaccaaggtgttggagacatgtctctcgggggacctgctgacgatgccggtggccctcccgcaccacctcctaaggatgcctccagcaatcccgcgggagatagaggttcctacggctctggttcgggacagtacagccaggctggcggtggttccgacttaatgccccctcgtcatccttatgcaccgggacctggtggatcgggtattcctaaggcacgccccaactttaccaagttagacttaatcaaatatgatacgccacacctgggccctcgtattcaactcatgttgtcccagatccagttcaagctcaatgtcgaggagcagtacctgaagggtattgagaagatggttcagctttatagcatggaaggtgatcggaagagcaaagccgacgcagccgctaggaaggttgaaagcaagcagaagattctactgttgaagcaggcactcaagagatatgaagaactgcatatcgacgcggacgttgcggatgcacaagatggtaagttggcgttgaatgacgtcgaatgtgaagctgacaaagagttagatgattcaatcaacgcccccaacctcaggaagcccctcagtggacaactctcgattcgaatgatagcaatcaaagatgttgaccatgctgcgactggacggttcacgagaggtcccgagacctttattgccgtgaaggttgaggataccgtcatggctcgtacgaaagcgtccaggaacgatcgatgggaggctgagttccatactatcgaagtcgacaaggccaacgaaatcgagttgactgtctacgacaaacctggcgaacaccccatgcccataggcatgctctgggttcgcatttccgacattgttgaggaaattcgtcgcaagaggattgaggccgaaatgaacagctctggctgggtgtctgccgacagaatgggcagcaccagtgctgcccctacacagttcccgatgagtccttcttcaggctcttttggaccaggtgctcaatcgactggtggtgaccaaggggatgatactggcccattcggagctgctggtccccagcctcaggtgcaaactggacctatcgaggaatggttcaatctcgagccaactggacagatccaacttcagttgacatttaacaagtccaacaacaacagccgccctgccgaccttggtcttggtcgaaagggtgccgttcgtcaacgaaaggaagaagtccacgagatgtacggacacaagttcgtgcagcatcagttttacaatatcatgcgctgtgcgctttgcggagatttccttaagtactcagcaggcatgcagtgtgaggattgcaagtatacctgtcatacgaagtgttattctagcgtcgttacaaagtgcatcagtaagagtaacgctgagactgatcccgacgaggaaaagatcaaccaccgcattccgcacagattcaacccttattccaacatgacagcaaactggtgttgtcactgtggttacatcttgccttttggaaagaagaactgcagaaagtgctcagaatgtggtcttactgcccacgcccagtgtgttcatcttgtccccgatttctgcggcatgtcaatggccgtcgccaaccagattctggacggcataaggactcagaagcaaagacaagccaaggtttcttcactttcagaaaagacacttcgacatggcaagactagcccgacaagcaccagctcgccggctccctcatactccagcacgactgctccttcttaccagtcaggaccagtctccccggaggctacagaggccgctaagatgatgtactcgaacccttccacgccgagacctgccggccctgatcgaacttcatccagctcccaagctgcggctgcagcatctgcggctatgtctggaggacctggtgcggcccaacggcagaactcagactttgggcgatatagcggcggttacgatcaaccgcaagaagacccctatgctcaaggaggtcaatacggcgcgggccagcagcgtaagtacaacccggccgattatgcgaacgtgaaccctggctacggaggaccacagcctgctgctcaggctcagcgacctgtacagcagcagccagcccaacaacctcctcctcagtcaccgctacctccagtaccgcaacaccaacaacagcagccacaggctgcctaccaacagcccgcagtgccggcgcatagccctcagcaaccagaacccatgtctcctaagcagcagtcagcggctggtggtaagtctgctcccttggctactgaccctggaactggccagcgtatcggacttgatcatttcaacttcctggctgtgttgggcaagggtaacttcggtaaagttatgttggccgaaaccaagcgctctcgaaagctctatgccatcaaggttctcaagaaggagttcatcatcgagaatgatgaagtcgagagtatccgttctgagaagcgtgtgttcttggttgccaaccggggcagacacccattcttgaccaacttgcatgcatgcttccaaacagagacccgtgtgtacttcgtcatggagtacgttagtggtggtgatctgatgttgcacattcagcgaggtcagttcggtactaagcgtgcgcaattctacgccgccgaggtctgcctggcgctcaagtacttccacgagaacggtgttatttaccgtgatttgaagcttgacaacattcttctctcacttgatggtcatgtcaagattggtgattacggtttgtgtaaggaggatatgtggtatggctccacaacaggtaccttttgtggtactcccgaattcatggccccggagattctcctggacaagaagtacggccgtgctgtcgattggtgggcatttggtgtgctgatttaccaaatgcttctgcagcagtctcctttccgtggagaggatgaggacgagatttatgacgctattctcgccgatgagcccctgtaccccattcacatgcctcgagactcagtctcaatcctccagaaattgctcactcgtgagcctgaccagcgactcggaagcggcccgactgatgcccaggaggtgatgagccagccattcttccgaaacatcaactgggatgagatgtaccacaagagagtgccgccgcctttcatgccgcagatcaagagtgcgacagataccagcaacttcgactccgagttcacaagcgttactcccgttttgactccagttcaatccgttttgtcacaggccatgcaagaggagttccgaggcttctcatacacagctgattttgactaa

SEQ ID NO: 322 - DNA, 5592 bp, Fusarium oxysporum
  source 1..5592: mol_type = genomic DNA
atggctatgagcctcccacagctcggcggcgcaggaggccctcacactcaaccctctttgccatcgttgccagcacatcttcaatccgatacgcatctcactgctcatctcgccagtcgcttccatgtctcgcatcctaccgctcgactgtcttctcacgctctcatctctctcaacacctataccaactcctcaaagggtcccgatggcggcaaggaggggagcgccatggctggcgccgaggaaatcgctgacagagcttttctgcgattaggacacagatccgagaaccaagccgttgtgtttttgggtgaatctggcgctggaaagtctactattcgagcccacctcctgactgctcttctcaacaaatcatcgacgcctctgtccacaaagctctctctcgccgcatatgtctttgatagtctcacaactaccaagactgccacaacacccactgcttccaagtccggtctcttctacgagttgcagtacgatacttcagccacaacaaaccctgttctgattggtggtaagctcttggatcatcgtctggagcgtagccgtatcgccgatgttcccacaggagagcgtaacttccacgttctttactatcttcttgccggaacaagcgaggctgaaaaatctcatctcggcttggacggtggttctgccactggaaccactcaaaagcgatggaagtatcttggccatcctactcagctcaaggttggaatcaacgatgcagagggtttccaagttttcaagaatgctctgcgaaagctcgagtttcctcgcgccgaaattgccgagatatgccaaatcctcgccagtattcttcacattggtcaactagagtttgagacaactagccagaccagcgtcactggcgatgatagtggtggtttctctcacgagggtggtacaaccattactgctgtcaagaacaaggatgttctcagcatcatcgctgctttccttggtgtcagcgccgctgacctccagaccactttgggctacaagaccaagatgatccaccgagaacgtgttactgttatgctcgaccctaacggtgctcgtgctcacgccggagagcttgcccgaacactttactctcttcttgtggcttggattcttgagaccattaaccagcgactttgtgctcccgaggagtccattgccaacactgtctcgatcgtcgatttccccggtttctgccagcaaactcccactggctctgcgctcgatcaacttctcaacaatgctgctaccgagtgcatttacaaccttactctccagaacttcttcgaccgcaaggctgatatgctggagtctgaggaagtcagcgttgctgcgaccagctatttcgataactcggacgctgttcgaggcatcttgaagcccggcaacggtcttcttagcattctcgatgaccaaactcgacgaaaccgaacagatatgcaattccttgaggctcttcgaagacgtttcgatggcaaaaacgctgctatcgaggtcggctctgcccaagctaagcttcctggaagcaacttcatgactgagaacacatctgctgtcttcaccgtcaagcactttgctggtgaggttgattaccccgtcaagggtctcatcgaagagaacggcgagatcatctctggcgatctcctcaacatgattaacggcactaagagcgagtttgttgcccgccttttcggtcaagatgctctccagactgtcactcaccccaatgaacgcactaccgttatgcaggctaccgtcagctcaaagcctatgcgagcgcctagtgtcatgtctcgaaagacgcatcgaactggtcgtcctagcacagcttacaagcgccagcagcaagaggccatggaggagttagatcagcagagccaggctggagagtctaagaagaacgccaagatgactctcgagcaaggtgcttcaggccagttccttgcctccctggacaatgtccagaaggctgtcactgaccctggcaccaactcatacttcgtcttttgcttgaagcccaacgatcgacgaattgcgaaccagttcgacagcaagtgcgttcgtatgcaggtccaaactttcggtattgcagaaatcagccagcgtcttcgatctgctgatttcagtttgttcttgcctttcggcgagtttctgggtatgacagacccggagacaatcttggtcggcagtgaacgagagcgtgctgagatggtcattgaagagaagcagtggccccagaatgaagtcagagtcggtgccactggtgtcttccttagcgaacgctgctggatggagattgcccagcttggcgaggcagtgtcagtttctggtcgctacggcggcttgccttcatcagatgctggtgatggtctcacacctgctgagtctatggctttcggtgcctccaaggaacatttggtttctggtggcaacacccctctcatgtacggtgagaaggccaagggtggttacttcactgatgacactcgatccgaggctggtgtttctgcctttggtggcggtgacatgttcaagaacctcgacacacgcgagcagatggctgagcgaggcaatgagaagtctctcgaggaggttgaggagtatagagataagcctagccgcaagcgttgggtggctctcgtcttcttcctcacttggttcatccccgattttgccatcagactgatcggacgtatgcctcgaaaggatgtccgtatggcctggagagaaaaggtggcgatcaacatgctcatttggttgatgtgtgctgtcgccgccttcttcatggtcggattccctatgctcatttgccccaagcagtatgtctacagctccaacgaactctcttcctacgacggtgacaagggcagcaagggcgcctacgttgctatccgcggtttcgttattgacctcaatgccttcattcccaaccattatcctggcagcaacctcgtcagcgaggatactctcttgaactatgccaggcaaggatatcatgcgctcttttccccatccaagtgtctgcctctgtgccagggcaaagatggtcagatccctcctgaggttactctcgacaaccgaaacaccaacatcactggtcagccccagcttcttgcctccagagatattgatgtcaactctgtctaccacgatttccgttatttcaccaatgacagccgacctgattggtacttcgagcagatgtacaccttcaagcatgtctacctcaagggacgaatgggttacagccctaagtatgtcaagaagctggcccgagatagctcttggaacgttgtcactatccacgggaaggtttacgacatgaccaagtacctccagggtggtctccgtttgaaggccaaggctggcaagcctactcccaacatcccaggtgccacagacttcatggaggacagcgttgtccagctattccgaagtgcaaagggccaagacgtttccaagtactgggataacatcaagcttagccctgtcaaaaaacaacgcatggagacctgcctgaacaacctcttctacattggtgactcagatactcgaaactccacccgctgtcagttcgctacatacttcatcttggctatttcagtcatgctcgcatctatcctggtcttcaagttccttgctgcgctccaattcggtggcaagaacgtgcctgagaacctcgacaagttcgtcatgtgtatgattcccgcttataccgaagatgaagactcgttgcgtcgtgctatcgactcgctttctcgcatgaagtatgatgataagcgtaagcttctcgtcgttgtctgtgacggtatgattatcggtcagggtaacgacaggcctacgcctcgcatcgtgctggatattcttggtgtcccagagactgtcgatcccgagcctctcagctttgagtctctcggtgagggtatgaagcagcacaacatgggtaagatctactcgggtctttacgaagtccaaggccacatcgttcccttcatggtcattgtcaaggttggcaagccttctgaggtctctcgccccggtaaccgtggtaagcgagactcccagatggttctcatgcgtttcctcaaccgcgtccactacaaccttgccatgagtcccatggagcttgagatgtatcaccagatccgcaacattattggtgtcaacccaaccttctacgaatatctcttccaaattgatgccgatactgtcgtcgctgcggactcagctactcgaatgatttcagccttcatcgatgatactcgcctgattgcttgctgtggtgaaaccgctctcaccaacgccaagggctctttcatcactatgattcaggtctacgagtactggatttcacacaacttgtccaaggccttcgagagtttgttcggctcagtcacttgtttgcctggttgtttctctatgtaccgaattcgcgctgcggagactggtaagcctttgttcgtcagcaaggagatcgttgaagactactccacgattcgtgttgatactctgcacatgaagaacctgctccatcttggtgaggatcgatatctcacaaccttgctcctcaagtaccactccaagtacaagacgaagtacctcttcagcgcacaggcctggactattgcccctgactcttggtctgtcttcctgtctcagcgacgtcgctggatcaactctactgtgcacaatttggctgagcttattcccttggcccagctttgcggtttctgctgtttcagtatgcgttttgtcgtcttcatcgatcttctgagcactatcgtccagcctgtcattgtcatgtatattgtctacctgatttaccaggtcgctaccaacccttcagttgtgcccattacagctttcctgctgctcggtgccatctacggtctgcaggctgtcatcttcatcctccgacgcaagtgggagatggttggttggatgatcatgtacatcgctgccattcctgtcttctctttcggtctgcccctgtactccttctggcacatggatgacttcaactggggtaacactcgtgttattgctggtgaagccggtaagaagatcgctgtttcagatgagggcaagtttgatcccaactcgatccctcgcaagaagtgggaggagtaccaagccgagctctgggagacacagacccagacagcccgtgacgatgtgcgatcagagatctctggttacagttatgccaccaaggctcaaggacccttctctgagtacggtggtggttaccagcccagccgccccggctcaacagctggcttcggccaccagaacatgtctcgcatgtctctggcccattctgagatgcctggcaaccgtgcgagccagtttggtggctcacagttcttctctcccgaggacctggttggcatgcctagtgatgacgccctcctcgctgagattcgtgacatcctcaagacagctgacttgatgactgtcaccaagaagggcatcaagcaagagctggagaggcgattcaatgttcccctagacgcgaagagggcctacatcaactctgcaactgaagccctgctttctggccaattgtag

SEQ ID NO: 323 - DNA, 1992 bp, Fusarium oxysporum
  source 1..1992: mol_type = genomic DNA
atggatctatcacagcgggcgcttccgcgtcacactcatcaccaaccaccaccatctctctcaaatccttcgccctcacatctgccgcctcaacattctacgtctacgtatagtcctggtcccgttgcctcgcatccaactctccctcttcccggaactcacccaccatcctcggctttgacaccaggatcggcctcaacatcccctgcatccatctcccaccggttaccttcagcatcagcttcgacgacatcaaggcatcctactggcgattatctccctgacgcagatgatcaagacgcgtcgacacccgtggatggagaggaacctccaaagaagaagcaaaagcgcaacaagccaactctttcatgccatgaatgtgtagagcgcaagaccaagtgcgacagaggtcgaccccattgtcttgcctgcataaaacgacagactgaatgccgatatgcccatgtcgcaaaccttctcgaggagaccaccaggtcagccgccaatggccgccgtatgacgaaacccccaaagaagaagtctggctctagtggaaagtcccccattccaaatatcgcagataggggtatgtcgaatgatcccagggcaacctcgcgtggcgctgttgccctctctatcggccttctgtccaacgttccttattccttgccttctgcaagtaacgtttttggtatcgggtccgagcacccatttgccaactactggacctgcgaagggggcttgcctgaggttatctcggtgcttccagacaagattcaagccgatatactacttagccgatacttcgaatgtgttgaccccgtgtatcccatgatacatcgccagacattctatgcggactacgaacacttctggcagatgaatcagcaagaaaagaccgatacagatccgtccttcattgcattaatctttgtcatgctggccctgggaactcagtttgtaacatcgactacatccccacaggagcgaaggcagacagcagagttctatgcttcggctagcaaccaagctctccgtatcgcatcatatcttagcagtgcatcgttacggtcaatccaggctatggtattgctagtgtacttccttataaacgacaaccatgcctcagatgggtgggcgtttgcaggtattctgattcggcaagcttatgctatgggtcttcatagagatccaaatattgtgactccaaatgccaccctgtttgagaagcagcagcggcgtaaggtctggcaagcggtacttctccaagatactttcttgaccgtcttactctccctgccaccgtctgcgacacatacagatgtttccgtggaagacctactcgacgatggctcctcgattgcaaatagcgacccaacagatacggcatatattcgaggctcttggactttggccaacttggttcaggagacgatctgctcaccaagatcgttagacctaccaatctgcactacggcaaggcataagtctaagttgattgctgacttccgagctgtttaccgttcgttccctgacgtcttccggtcttgggatcctgatagtatcacggcgctcgcgaaaaccaataagagggtggttcgtcagaccctgttcctgacgagcaactacttccataacttgatgcttgttcatgcttccgagagccctgatgttcctgtcaatgttcgtggtacactggaggcagcgcacgacgccattacagctttcttccttcttttcacccttcttgagatagaagcacgtgtttggtgggtgttcaaccaccgagctttcttggaggcgctgtgtatcggaaatgtcctgaaggaggctgctcgagaaccaggtggtgcagatatgatggcaagagatcctctccttgtcagggcaaaagctgatatcacacgcatgatccaaatcatgcaggttatgggcgaagactctgaggtagcgaggactcgagtgcaggttttgagtgactttctggcatga

SEQ ID NO: 324 - DNA, 1581 bp, Fusarium oxysporum
  source 1..1581: mol_type = genomic DNA
atggctcatcatcaagcgcggacgatggctatggatccgccacatatcaccgaatttgcttctgagcgttacttcgaaaagttaagccagctcaatgcacaccaacatcagcgtcaacctcctccgactcgagataatcttgatgcttccacctcgtcgccttcgagatttattcttcctctacgagaaacgaaaactgccgatgttgaacctctaaggccccttgaccagaagcgtgataaatcaaggtttttcggccttcgctcaaaggtctcgatcctccactctaaatcgagtgtcgcgtctggtcatgcgcctcgagtttctgttgagacgccgcaaaaaagtgctagcttcgatcagcttttcctaggacttcccaacgaattacagattcaaatcatttctgccctcccactaaccgacgtcctgaacctccgacttgcctccaaatcgtggcatactctcgtcactttcaacgaaaatactatcgctcgatatcatctcgaacatcatattcccgtttacgcctcccgcctctaccccatcacagacccgagcgagatcaacttccaacatctatgcgggatatggcatcgattacacgtcgctgccaagctcgcctttctaatgtgtgaatggattacaaaagatatctttcttcgccaaactgaagctcaacgacttgcatttgcaccccagaacgagcgcatgcggcgacgcctaatacctcttctatttaccatattccacttcttcgagacgtaccgaaaattgtacctaaagcgtatggctgagaacggaggaaaaggattgagacgggaaccttatactttgaacccgattgaagccgaaatcatgagtatgtacgacgaccaaaccttattaagggttcacgaagtttttccccttgtaatatcatcgttctgtcggagactccgaccaccgacatatgttggtagagtcgagcgatcacttcgtggctatattcgggagaaaccgtccgacgacatgcatgttgccattttgtgcattggtggactgcgacaagtggaaaggctttgggaaatcaagggatacaacagcaggcgtggtgctgttgacacatggtttaatgctctcacgaaagaggcgccacctactgaacagtcaacgtcgaaaccgaaacgaggtcttttcggacgcaaaaagtccactagtgaagctcgatcgtctggtactgcattgaacaaggtccggagttctggctcaatagatgggaacatggattgggaagccaatcttgtcttcaacacgagtttatctgctggggctcccatgtcacctcttacttcgcaacaggctcaggcattactcagcgaccttcccgtactgcaacaaatatggctcacaacagctgaggccctgatccttcagcgtcgggttgtcgagcgtccacaggatatcaaacgcaaccaacaggtcatgctggatttgatcagtgaagatggacttgtagaagaggacgaatggtggtacggccgcagcattcccgattctgtgcggcctcccgtcggtgtcactgatgacgatgcggattaa

SEQ ID NO: 325 - DNA, 723 bp, Fusarium oxysporum
  source 1..723: mol_type = genomic DNA
atggcgtggacgtgcagcggagacactaactcggctcttattgggaacatgtggaagaatggtctcattgccgaccctcgagtgaaagaggcattcctcaaggttgaccgagctcactacgctccagccatgccatatgaagactcaccccagcccatcggctactcagcaactatatctgcaccgcatatgcacgcctcagccatcgagcatgttctcagctaccttcttccctcatcgacatcgccggccccccgggtcctcgatatcggttctggatctgggtatctaacccacgttatggctgaacttgtcggtgagaagggccttgtagtcggtcttgagcatattcgtcagctgaaagaacttggtgaaaagaacatgtcgaaaagtgaggagggaagaagattgcttgagagtggcaaggtgagatttaggtttggtgatgggaggaaggggtgggttgaggaaccgagagagggagagaagaatgaggggacgggctgggatgttattcatgtcggggcttctgcagtggagattcatccagagctattggagcaattgaaggcacctgggtgcatgttcatccccgtcgacgatgacaagatggggtacaaccagcacgtttggagaattgagaaggatggaaatggggagattacgaagaagaagttgtttggagtccgctacgtgccgttgactgaggcaccgaaggcgtag

SEQ ID NO: 326 - DNA, 2790 bp, Magnaporthe oryzae
  source 1..2790: mol_type = genomic DNA
atggcgtatagaggtgctggagggccgggaggcggccgtgactacgatggtcacaacatgcaagacctaaaccctcacagccagtattccaatgtccaattgcctcctgggcacgagcaagaggacgaggcacacaggtcccttttgacccaaggcacaacgctctacgaccacgaccgactcggcgcccacacgcctccagtgcgtccagtctcggcctacagtctcacagagtcctatgccccgaatgctcccaccaccgttcctggctcggccgtcggcgcatctccctcgccatttcagaatgactatggtgtttcgtcgggctaccagggcgcaatgggcggccacgcagacgacggcttccccattggcggcggagacccccagcaaggccacccctacgataccgaggacagctgggtgcagcgccagaaccccaacgccgctccccagggtggtggtctgaaacgttatgccaccaggaaggtcaagctggtgcagggttcagtcctgagcattgactacaacgttcccagtgccatcaggaacgccgtgcagcccaagtaccgcgagcaggagggcaccaacgaggagtttatcaagatgcgatacaccgcggccacctgtgaccccaacgacttcaccctgaagaacggttacgatttgcgtccccgcatgtataacaggcacacggagcttctgatcgccatcacctactacaacgaggacaaggtactgctgtcccgtaccctgcacggtgttatgcagaacattagggacatcgtgaacctgaagaagtcgactttctggaacaaaggcggcccggcttggcagaagattgttgtctgcttggttttcgacggtatcgagaagaccgacaagaacgttctggacgtcctcgccaccattggtatctaccaagatggcgtcgtcaagaaggacgttcacggccaggagactgttgctcatattttcgagtacaccactcagctgtccgtcaccccgagccagcagctcatccgaccccaggacgacggccccaacactctgccgcctgtccagttcatcttctgtctcaaggccaagaatagcaagaagatcaactctcaccgttggcttttcaacgcctttggacggatcctgaaccccgaggtctgtattctgctggatgccggtaccaagcccagctcgaggtcgcttctcggtctctgggagggtttttacaacgacaaggatcttggaggtgcttgcggtgaaattcatgctatgcttggaaagggcggccggaagctgctcaaccccctcgtagctgtgcagaacttcgagtacaagatctccaacattctcgacaagcctctggagagtgcgttcggatacgttagtgtgttgcccggtgctttctccgcataccgcttccgtgccatcatgggacgacccttggagcaatacttccacggtgaccacaccctgtccaagattctgggcaagaagggtatcgagggcatgaacattttcaagaagaacatgttcttggccgaagatcgtattctttgtttcgagcttgttgccaaggccggccagaaatggcacctgagctacatcaaagctgccaagggagagaccgatgttcctgagggtgctgccgagttcatcagccagcgtcgtcgttggttgaacggttcgtttgccgccaccttgtactcactgatgcacttcggaaggatgtacaagagtggtcataacatcatccgcatgttcttcttccacgtccagctcatctacaacatcctcaacgtcatcttcacctggttctctctggcatcttactggcttaccaccaccgtcatcatggatctcgtcggaaacccccaagttggacagaacgctcgcgaaggctggccttttggtaacaccgtcacgccactcttcaacgccgttctcaagtacatttacctggcctttgtcatcctacagtttattctggccttgggtaatagaccgaagggatccaagtacacctacgtcacgtcattctttgtcttctcggtcatccaggcgtatatcctggttttgtctggatacctcgtcgtccaggccttccagacacctatcggcgagcagatcaagaccgacacggccaaggatttcatggatagtatatttggaaagagcggagccgctggtgttattctactcgccttgatcgccatctacggtatttacttcatcgcctcgttcatgtacctggacccctggcacatgttccactccttcccttactacatgctgctcatgtccacctacatcaacattctcatggtgtacgccttcaacaactggcacgatgtttcttggggtaccaaaggatccgacagtaatgaagctctaccctcggccaatattaccaaaggcgagaaggacgaagtcgtcgtggaggaaatcgacaagcctcaagaggatatcgacagtcagttcgaagcaactgtccgtcgtgccctggcacctttcaacgacgaggagaagcccgagcccaaggatctcgaggactcgtacaagtctttccgtacaatgctggttgttctctggctcttctccaactgtctcttggctgttgcgattactagcgataatttcgacgctttgacaaagaaccaaaacacggccaggactgcctctttcttccagttcttgctgttctcgaccgctttcctctctttgatccgtttcatcggattcctctggttcttgggcaagaccggtataatgtgctgcattgcccgtcgctaa

SEQ ID NO: 327 - DNA, 5619 bp, Magnaporthe oryzae
  source 1..5619: mol_type = genomic DNA
atggcacaacaccttccgcctgtcggcggcaacggtggtgcacacacgcagccttcgctacccgcgctgcccgcccatcttcagtccgacacgcacctcacggggcatcttgccagccgattccacgtcagtctgccaaccgccaaactatcttcccacgccttcatctcgatcaacacatacacttcctcgagcaagggacaagatggaggcaaggccggaagcgctcaaggcgaagctgaggatatggccgacagggctttccttcgtctgggccaccgttccgagaaccaagcaattctgttcctaggtgaatctggctcgggaaagacgaccattcgatcgcacatcctgactgcccttctgaacaagacctccacgcccctttctacaaaggtctcactcgccgcatatgtcttcgacaccctaaccactactaagactgcgaccactccgactgcctccaaggcgggtctcttctacgaactccagtacgacacagcatcaacaacgagcccgctgctcatcggtggaaagctgctggatcatcgtctggagagaagtaggattaccgacgtgccaactggcgagcgaaacttccatatcctgtattacattttggccggcacaagtgccgctgaaaaaacccacctgggctttggagagcccgatgctggaaccggaagcaagcgatggaggtatcttgggcacccgacccaactgaaggtcggcatcaacgacgctcaggggttccagctcttcaagactgccctccgcaagcttgaattccctaggagtgaaattgcagagatatgccaagtcctggctagcattcttcacatcggacagctcgagtttgagagctcggaaaacacgacagttgccggcgatgagagcggtggcttctcgcatgagggtggccagatcacaaccgtggcaaagaacaaggacgtgcttgctatagtggccgcatttttgggtgtcagtgccgctgagcttcaaacaacccttggatacaagaccaagatcattcacaaggaaagggtcactgtgatgcttgaccctgctggtgcacgcgccaatgcaaatgaactagcccggactctttactccctccttgtggcctatgtcatcgagaacattaaccaaaagatctgcgctcccgaggaggccattgttaacacagtgtccatcattgacttcccgggattctcgcagcaaagctctactggctcatccctcgatttgctcctcaacaatgctgctgccgaggctatgtacaacttgaccttgcaaaactttttcgatcgcaaggctgatctcctagagaccgaggaagtcagcgtcccacccaccagctactttgacaactccgacgcagtcaagggactgctcaagaccggcaatggtctcttgagcattcttgacgaccaaaccaggcgtcaccgcaccgacatgcagctcctggaaagtctgcgcaagcgcttcgagggcaagaaccctgccatcggcgtcagtgcagccaccgcaaagctaccgggcagcaacttcttgtccgagaatactgctgcttccttcaccgttcgccacttcgctggtgaggttgaatattcgatcaaggggctcgtcgaggagaatggcgaagtcatctctggtgacctcttgaacctggtcaactctaccaagagtgactttattgctcgtctcttcggtcaagaggccctgcacactgttacccatccgcaggagagaaccacggtgatgcaagcttcagtcagttccaagcctatgcgtgccccaagtgtcatgtcgcgcaagatccgaccgggaacggctcgtactactcgccaacgcaaggagtcaatcagtgggcgacaggacaccctagacgatattgccagcgaagccggagattcccggcgccccgtcaacaagccatccgaggaaggcgcttctggtcagttcttacactcgcttgacaacgtgaccaagtctttccatgcacagaacacaaacgcctattttgtcttctgcttgaagccgaatgacaggcgcattgcgaaccagttcgacagcaagtgtgttcgcacacagatgcaaacatttggcattgccgagattagccaacgtatcagatctgcagacttcagtgtgttcttgccctttggagaattcctgggtcttgctgatgttgacactctcctcgtcggaagtgaacgggagaaggtcgaggctgttgttgatgagaagcgctggccgaccaatgagatccaaattggttccacaggtgttttcatcagtgaacgatgctggatggagatcgctcagctcagtgatatggtaaccggccgattcggcgtgcccgaatcggagggcggcacgccactcgccaacatgccctatggcgcttccaaggagcgcctcatagcggctgggaattcgccatacaacaatgacaaggccaagtcgggctactttggcagcaatgacatcgatggcaggtcagacgctggagtttcggcttttggcggaggcgacatgttcaagaatctggatacccgtgagcagatggctgagcgtggtaatgaaaagtccatggttgaggtggaggagttcaaagacagcccgagccgcaagcgctgggttttcattacctggatgctcacatttttcgttcccgagttcctgatacagcatctcggtaaaatgccccgcaaggatgtgcgtatggcatggagagagaagttggccatcaacttcatcatctggttcagttgcttggccgccgctttcatcctggtcgtgttccctatgcttgtttgccctacgcaatatgtgtttaccggcgaagagctctcggcctacaacggaaaagatggcaaggcttcgtatgcagccatccgtggtcaggtctttgatatcggatcgttcatccctaggcaccccctgccctatctgccatcaaagctcttcacccagtacgctggcactgatatcaccggtcttttccctgttcaggtgtctgctctgtgccaaggcacgactggctctgtcaaccctgccgtgctactggattacaaagacaccaacatcaccgactcgcccaacgtttttaacagccaggatctgaattcgcgctatcacgactttcgttacttcaccaacgatacaagacccgactggttctctcagatgatgattacgttccggggcacgtataagaagggcaacatcggctacccggctcaagttgtccagaagatggcccaacaaaggaacgccatcgcaatactcaatggtcgggtgtacgatttcaccaagtacatcgctggaggccgcgatttcagggtcaagtataacgaaacgcgtcctaccgaccagagtctactcgactttatggacccgtcagtcgtgaggcttttctcggaccgtagcggagaggacgtcacgccgctctgggatgcacttaggctggacccgactttacgaaagtcgatgcaactctgtctggataacctgttttaccttggcgatgtcgatacgcgtaactcggtgcgttgcaactttgccaaatacttcatcctggctgttacgatcatcctttgctccatcatcgccttcaagttcttggctgcgcttcagttcggtaccaagaacatgcccgagaacctggacaagttcatcatgtgccagattcctgcctacaccgaagacgaagagtcgctccgtcgcgccattgactctgcagcccgtatgcgctacgatgacaagcgcaaactcttgatcgtcgtttgtgacggtatgattattggtcagggtaacgacaggcccacgccgcgcattgtgctcgatattttgggtgtctcggagacggtcgatccagagcctctcagcttcgaatctctgggtgagggtctcaagcagcacaacatgggcaaggtttactcgggcttgtacgaggttcaaggtcacatcgtccccttcttggtggtcgtcaaggtcggcaagccatccgaggtgtcgcgccccggtaaccgtggcaagcgtgattctcaaatggttatcatgcgcttcctgaaccgtgtccactacaacttggccatgagcccgttggagctcgagatgtaccatcagatccgcaacattattggtgtgaacccgacattctacgaatacatgcttcagatcgatgccgacacggttgttgctgccgattcagcgactcgtttcgtctcagctttcctggatgacacccgcctgattgcatgctgtggagagacgtcgatcgccaacgccaaatcttcattcatcactatgattcaagtttacgagtactatatttcgcacaacttgtccaaggccttcgaatctctgttcggctccgttacttgtttgccaggttgtttctccatgtaccgtatccgcgccgccgagacgggtaagccgctcttcgtctcccgcgaggttgtcgatgcatacgccactatccgcgtcgacacgcttcacatgaagaacctgcttcaccttggtgaggatcgttacctgaccacgcttctgctcaaataccacaacaagtacaagaccaagtacatttaccgagcacatgcttggaccattgcccccgactcatggaaggtcttcctctcacaacgtcgtcgctggatcaactcgacggtgcacaacttgatcgagcttattcccatgggccaactttgcggtttctgctgtttctcgatgcgtttcatcgttttcatcgatttgctctctaccatcattcagcccgtcaccattgcctacattgtttacctcatcgtgcgcatggtcctcactcctgatctggtccccgttctggctttcgtgctgctcgcggcagtttacggccttcaagctatcatcttcatcctccgccgcaagtgggagatgattgcatggatgattctatacattatcgccatgccaattttctcgtttggtctgcccctgtatgccttctggcacatggacgatttcacatggggtaatactcgtgtcgttaccggagagaagggtaagaaggtcgttgtcactgacgagggcaagttcgatccctcatccatccctcgcaagaagtgggaggagtaccagagcgagctgtgggatgcccagacctccaaggatgacaccaggtctgaggcttccggcttctcgtacgccaccaaggcccccgtcgcggtctccgagtatggtttccccgtcaacccctatggcgcataccctcccagccgacctgggagcaccacgggcataccacacatgccacacatgccatactcggccagccgcatgtcattggcccattcggagatgctcatggcgggcaacagacaaagccagttcggtggatcacagttcaacctccctcaatctggcagcgaaatggaactttcaaacctggctggcttgccatcagatgatgccttgcttgccgagattcgggagatcctgagaacggcagatttgatgacggtcaccaagaagggtgtcaagcaagagctcgagcgcaggttcggtgtaaacctcgacagcaggagggcgtacatcaacagcgccaccgaagcactcttgtctggccagctgtag

SEQ ID NO: 328 - DNA, 2487 bp, Magnaporthe oryzae
  source 1..2487: mol_type = genomic DNA
atgggcaatccctttgaaggatggccggtacacgatatcgtttacacggtaatcgtcggcctggtcatgttggctgccgtcctggagtggttcctctgggtggcggccttcatgtattgtcttgttaaggtgtttataaaggcggagcattggacgattcgggctctcgcggttgtggttgccatccttttcgtcggattcagagcggtcttcttgccaatcatggtagtgacactgcccttaccaagcgctattgtgaaactctggccggaagacatggttgtgggactacagtggtttgccttctgggcgttcgccggtctcctgacgatcccatggcttttctgtgtctaccatttcgtcaccaaccagctaggccgagagaagcgtgtcaagcaggtgctggatgaggtctcggccccaaaggttgtcatcgtcatgccttgctacaaggaagacccagaggttttactcgtggccatgaactcaatcgtcgactgcgactacccgccatcttgtatccacgtgttcctgtcctttgacggagaccaagtggacgagctttatctcaacacaatcgaaacggtcggcgtgccgctcaccttggactcgtaccctaagagcatcgacgtcacttacaaggctgcccgtatcaccatctcccgcttcccccacggcggtaagcgtcactgccaaaaggcaacgttcaagctcatcgacaaggtctacaaggaatacctcgagcgcaacgacaatctcttcattctgttcatcgacagtgactgcattctggaccgtgtgtgcctccagaacttcatctacgacatggagctgagccctggaaactcgagggacatgttggccatgactggagtcattacttccacgaccaaaaagcacagtcttattaccgtccttcaagacttggaatacatccacggtcagcttttcgagcgtacggtcgagtctggatgtggtgctgtcacctgtctgcccggagctctcaccatgttgcgtttctctgcgttcaggaggatggccaagtactactttgctgacaaggccgagcagtgtgaggatctcttcgattttgccaagtgccatttaggcgaggaccgctggttgacgcacttgttcatgatcggtgccaagaagcgataccagatccaaatgtgtacctcagccttctgcaagaccgaagccgtgcagaccatgcagtctctggtcaagcagcgccgtcgttggttcttggggtttatcaccaacgaagtttgcatgttgactgactggcgtctatggacgcgttacccgctcttggtgttgatccgcttcatgcagaacaccattcgtaccaccgctcttctcttcttcatcatggttttggctatccttaccacctcgaagcgggtcagtgacctgcctgtcggtttcatcgccatctcgctcggtctcaattggctcatgatgatctactttggcgccaagctccgccgcttcaagatctggctgtaccccctgatgttcgtactcaatcccttcttcaactggtggtacatggtctacggtattttcacggccggtcagcgcacctggggtggacctcgtgccgacgccgccgccgccgacggagacaccaccgcccaacaggccatcgaggcggccgagaaggccggcgatgacctcaatatcgtgcccgagaccttcatcccggcggcgcagatcaagcgcaaggagagcggcaggcggcgcatcgtggccggtggcaacatccagccctcggccaagatcgacggcatgtttgccatccccgagcgtggcgccaacggttggtaccagcacgacaacatctcgctattcacggttgcccacggccacactggccgcgttcctctgcaccctcgtgactcattcgacagtttcttgtctgcgcagacggccctgaactcggtctacatcccgcgccgtgtcgagagtataatgggtgacgaggatcggcgcaagtacgagctcgcccaggccagccagtttaaccagttcctctccaaccagcgccgctcgaccaacggcgagccgccgcagggccaggtgtacgagtatagtgacgtcgacctgcaaaaggccgggtacactgacaacccgctgccgcccacgcctggagagactgcctctgctgttcctgccgccctcaatctgcaccacaaggttggcagcaccgacagcctcgttagtcttgggtcttcagcgtccaacagcaaccaacgggaccgcggaaggcagcgcaccctgatgccaccaacctcctcacaggcccggaccggtaggagtccactcggccgggcgagcttcttgcgcacgtcgacgattgaggacattgagctggagattggcacaagccatggaagcagcgcaaacagacctgcactgagcaggcaagcgtcgaacaacgaccccaacaacagcaacagcggcggccatcagcaacggtag

SEQ ID NO: 329 - DNA, 1158 bp, Phytophthora infestans
  source 1..1158: mol_type = genomic DNA
atggctccgactgtccaaacgtgtgatcctgtactggtgtgcgaccctgtcctcctgtgtgaccgaagtgactccgtgctggcgagcgaccctgttccgccacagaatctctcgttcgtgctcgaaaaggggggagcagtcaagtttgaagatcgtcccgtgcctgaaattaaggacccacatgacgtgatcttgaacgtacgctacacgggaatctgtggtagtgatgtgcactactgcacgcacggctgtatcggcaagtacgtggtggataagcccatggtgctaggccacgagtctgctggcgtcgtccatgccgtgggatccgccgtcaagtctctcaaggtaggtgacgaagtggccatggagccgggtgtgccgtgccgccgttgcgtccgctgtctcgagggaaactacaacttgtgtccggatatggcgttcgcagccacgccgccgtacgacggcacactggccaagttctaccgcatgccggaggacttctgctacaagctgccgtccaccgtcagtatgcaagagggagcgatgctcgaacccacagccgtggccgttcacttctgccgtctggccaaggtgtccccgggtcagaaagtcgtcgtgtttggtgtcggtcccgtgggtctgttgacctgcaaagtggctcgttacgtgttcggagccacaacagtcgtcggcgtggacgtcaatgagaaacgtcttgcggtcgccaaggaacacggcgcgacgcacgtgtatcaggggaagtccggcgtgacaccacaggagtcggccgagcagatcattgccgagtgcggactgggcgacggggccgacgtcgtgattgacgcgagtggagcggagccctgcattcagacggcaatctacgtcgcacgcagcggtggcacgttcacgcagggaggtatgggcaagacagacatcacgttccccattggcatcatgtgcggcaaggagctccgcgtgaccggcagcttccggtactctgcaggcgactaccaactggcgctcgatatggttgcaagtgggcagctgaacgtcaagggtctcatctcgaagattgtgccgttcgaggaagccaaggaggctttcgacaatgtccagcgcggtaacggcatcaagtggctcattgaaggacccaagtga

SEQ ID NO: 330 - DNA, 3907 bp, Fusarium graminearum
  source 1..3907: mol_type = genomic DNA
gatcttcgcttggccttgctccactaagaaggagtttcactagcggcccgcgatagctagcctgatcctagtctttacctcctcaacagtaacaccttctttcaccaccacaagctgagtcttgctcctttgttggaaacagtgaccggattcacacctgacctctggcaatcaataatttttgacccaagtcaggaacttatggctctgtgacagcaaacaagcgctgctgttgctgatttgctttggctgccattcactgacattgattgactggtggcaactaccaacaaacaccttctctcacataaatatacctactacctatctaattcctctccaatttcttccccgtcaactctctttctgcgcatcagcacacggatatcaactaagaatatgagcgacatttatcaacactctttcttgaagttttaaaacacaatatctttacttctttcgctatcaaacacatccttacatacattgacatcctctttggcccattctttgagtacccagacattatctcatcatggcggacagaggtgatcgaggcggccgtggaggccgtggccgtggcggacgcggcggcggctatcaagatggtcgaggaggcggacgaggtggcggagatgggagaggacgaggtgatggtggtttccgtggcggcagaggacgaggtgagggaggacgtggtgacttccgaggcggcttcagtggtcctagaggcggccgtggaggttctgatcgcgggagaggaggatacaggggaggccgaggtggagggcaattctcaaacgagccgtctttcttcaagatcgaatccggtgttcctcagcccgatgctgctattaccaagctcgaggatgaggtggtaaagaatcaaaataattctgttgcccagcttacatcgaaaatgtccaagttgggagtagaagaaaaggagcatttgagcaaattccctccacgacctgcatttggaaacaaaggccgtccagtcactttatgggcaaactattaccagatcgacaccaatattcccatgcttttcaaatacacaatttctgtcaaagagatcgtagctgaatcagaagaaaagaccgacaagcccactgtcgcccagcctaaggggaaagggaaaggaaaaggcaagcccggaaagcctaagaagtccggttctgtcgaagtcaagggacgtaaacttttcttggtcatcaaagagactctaaacgagctcaccaagaaggacaagagcctgcttcttgcgaccgagttcaagtctcagcttatctccttgcgcaagcttgaccttggacttgacaactcatttcgagtaaacctcccgtcatcagcaaaccccgacaagaccgaagtctttgaagtgaccttaaatggccctgaagtagcccgagttgacgagatgctcaagtacgtcaaatcgaataccagtgcttcacatgacgccccaggcaaacttgccgacgacgacgacgatgcagcaaaagccctggcattcccaaaattccctgatgttgttgatgccctgaatgtcatctttgggtttggcccgaggtcgaacgaagacattagtgctgtcggaaactcccgattcttctctttcaagaacggtggtatctgcagggatatgagcatgcgtgggagacccttacaagctgttcgtgggacattccagtctgtccgcctaggtaccggccgacttcttttaaacacaaacatcactgttggcattttcaagatatccggtaactgtgccaagctcttccaggatctcaatgtctttgaagcacagaagtcggaatggcggaaagtgaataacgcgaagttgatgaacaaatttctcccaaaaacccgcgtactggcaacgatgaagtttgccaatgacaagaaagtccaacgacggaaagcaatttacagtctggcctatgcacctgagattgaacgagcctgtcgtggcaacgatcatcctccccggttcacgaagggttatgaataccctggaccaggcaacgtgagcttctacatggtgtctgattctaaagggaccggtgaatatatcactgtcagagaattctacaagcggaaatacaacgacactacgctcaaagactaccctcttcttaatctcggcactgccgcaaacccgaactttaccccagcggagtatgtcgagatcctaccgggacagtcagtcaaggcgaagttgaatagccaagaatcgaccgcgatggtcgattttgcctgtcggtcaccttacgccaatgctttatccattacgaaagatgcgcgggaaactctaggtcttgacgacgagaaattggtgtacaagcccggcaaaagcatacaaaaatggacctatgtcaatgtcaaaccaggaggcaggtctgggccggttccaaagcgcactgtgatggaatttgctcaggtcatgagacaaatgaatattggaatcagcagcaaccctgtagacccttgcacagaggtcatcacccaagaagattacgctcaaggacgttcagatgctttcttcaaatgggcgaagcagaatcgcatagagtttatacttgtgattcttggtacatcagagtccgaaacatacggcaggatcaagacattgggcgactgcacctatggtattcacacctgctgcgcccaggccgaaaagtttggattcaacagaaaccctctgccatatttcgccaactgtgctctcaaatggaacctgaaggcaggtggtgtaaaccacaagctccacaacgagttcggtctcattaaagagggcaaaacgatgttggtaggatatgacgtcacccacccaaccaacatgccttcaggccagggtgatgatgctcccagtttggtcggattggtggccaccattgaccgagatatgggacaatggccagcctactcttgggaacagtcgtccaaacaggagatgttggacgagactttgactgaagcattcaagtcacgacttgcactttggcaaatgcacaaccgacagcagctgcctgagaacatcgttatattccgtgatggcgtgtcggagggccagtttgcccaagttttacaaagagagctaccacgcattcgcattgcctgcaatgccaagtaccccaagaacaagccaccaagaatttctctgatcgtttccgtcaagcgacatcagactcgcttttatcctacttcttccgagagcatgacgtccaagaacaatatcgaaaacggtaccatcgtcgatcgtggtgtcacgcaggctcgatactgggacttctttcttactgcacactccagcatcaaaggcacggctcgccctgcgcactacactgtgttgctggacgaggtcttccgagcgaagtacggagccgaggcagccaatgaattggagagatatgcccacgagctctgctacttgtttggccgagccaccaaggctgtgagcatttgccccccggcatactatgcagacgttgtgtgcactcgagcgagatgttacagacctgagttcttcgaaatcagtgacgttgaaagtgtctcaacagctgggccgggcttaggtgccagtgacccaaagcaggtccatgcggacctcgccaactcgatgtactatatctaagtgtgccgtgtgtgggagatgagttcgctcttttgggctacaaacagagacgagaaatgaagcttttttttttggggggggggttttttttgggaaattggtaggtttctgttaaaggtatgaggtagcgggatatctttgattgtctttcgtttggtttatatcgttttgtcctcatctttgacttaggacagaatagttaggatagcggaaacagcttgcagtcttgtatttggtacttgaagttgcaaggttatacatagcaat

SEQ ID NO: 331 - DNA, 2955 bp, Fusarium graminearum
  source 1..2955: mol_type = genomic DNA
atgtctgatagagggcgctcaccctctccagggggtccctcagggcctgggaggcgaccttcacagtccccagcccgatcggcaactggctctggtagtggacctgctggcggctatgcaaagcccctgggctacgatcctgcgaagcctccaaagcaggaggaccagggaaacacacgaatggaactacctccagatgcgtacatttccgagaccaaaaaggatatgtttactttaagaaacaatcgtttcaacactgagggaaagcctgagcacatcgaggtcaaccagtaccgaatgaccaagttcgacttcaacaagaagatctaccagtacgatgttgtactttcgcctagccctgacaagatcggtccggtcatgaagaagatttgggctcatcctgttaccgtgaagaccatgaagccctacaagcttgagatgtggcttttcgacggtaagaaactggcatggagccccgcgcttgtcgaccgtggtgaacttcggttcagtgtcgatctagacgaaggccaacgtcctcctggagccaagcctcgggatggtggcaagttcctagtcactattcgaaagaccaccgagatccaagttgctgctctgcagggctatctgtctcacaagatgtccttcaataacagtgttcaagaggcactgaacttcattgatcaccttgttcgacagttcccctccaggaacctacttgctatcaagcgaaacttttaccaaactggtcgacctggagctcctcttcaagacggagccatcgttgaggtccacaagggaacctacgcttcaatccgaatgagtgacaacttgaagcaaggtggtgtcggacttggctacaacattgatgtcgccaacacctgtttctggattggcaaccagccattggacaggatggcctgcaactttcttgctaccattgacccaagcaagttccgaggacacactcctgcgactctcaatgagatcctgaagccagtcaggaataggagtggcgggtgggagtcatctgatggcttcaagcaacttcgcaagttgcgacgcctcaaattcaagatcaagcacaagggccgcccaaacgaggacaagctgtacacgatcatggactttgcattcgatgccaagtttggtgaagctggtcacacctcccgcacccacacctttgagaaggatggaaaggacatcagcgtctatgactactacaagaaaatgtacaatgtcaccctgcgactttcccaccttcctcttatcaacgctggaaagggtggcttcattcccatggagcttgccttcgttgagagcatgcaacgatacccattcaagctcaaccccgaccagacagctgcgatgatcaagatcgcggtcacccgccctgccgtacgcaaagccgacatccaaaagggagctgccgctcttcagatcggtcaagatccttatctgagggagtatggtgtcaatttcgaagcccagtttgcgaagaccgaggctcgtatcttgcctccccctactgtcaggtttggccagggcacagcggaacccaagttcgctggtcgctgggacttgcgaggaaagaagttcttcaagcagaacaccgcccccctccagaactggggctttgttgcctgtgaagcacctgtcccacaggctgttctttcagcattcgccacaacattcaagaccactttccttggtcatggcggcaaggtgactggagaccccatgcttctcaatgcacctagcaacctgcgttttgaacccggaaagctggttgagtgggctcatgaggagatcactcgccgaaaaggctacacacaactcttgttcattgtcgtgtccaagaagaacagtggtacctacgagcgcctcaagaagtctgctgattgcagatacggcattctcagccaggttgtccttggtagccatgtgcagaagaacaatggccaataccactccaacgtttgcatgaaggtgaacgccaagcttggtggtgccactgcctgcacgcctcctctgtggaagactcccacattcttccccgacagccgcccaaccatcattgtaggttgcgatgtctcccacgctgctcccggtggtgcgactgcttcagttgcttccatgaccatgtctgtggaccccaatgccactcgatacgccgcagtcgctcagacaaatggatatcgcgtcgagatgcttacccccagcaacattcgactcatgtttgcagaacttcttcctcagtggcgacacaaccacccaggaaagatacctgctcatctgatctacatgcgagatggagttagtgaaggccagttcgctcatgtattggagcaggaggtatccgaaatcaagaaattctttggaggcagcctcccccccgacaagattcccaagatgacagtcatcatcgctacgaagcgtcaccatgtacgcttctttccacagaggggtgacaagaacggaaatcccttgcccggtactctggttgagaaggaagttacccaccctttcatgtttgacttctacctcaactcccatgttgctatccagggaactgcacgccccgtgcactactcagtgattctggatgagatggctatgccagtgaatgatctgcagaagatgatttaccagcagtgctattcctacgcccgctcaaccacccccgtctcccttcacccggcggtctactacgcgcatctcgctagcaaccgagctcgtgcacacgagaacgtcgcaaccagtgatggatttagaaccggtgccaaggggcatgagattattcgggagaagcaagcccatggcatcacctcggacgctcctaacaggaccgctgatgcaccccccctgatccgtctaggaggcccttgtggacagactcctgctgatggcgagaagcgccaacgagattttttccgcagtaccatgtggtacatctaa

SEQ ID NO: 332 - DNA, 1494 bp, Fusarium graminearum
  source 1..1494: mol_type = genomic DNA
atgtcggacctacaaagccgcttggagaagctgcaggagcttttgggcaacggcgtgaagcttgctgaaacgccacacgaagacaacacaacagatggttccgctgcaaatggccttgggaatagcttcggaatggtgatggatgatgagtacatccggaacgaggagcggcttgcagctagagagcaggcctcccaggaacagctgcgagccgatgctgatgccgccagacaaggcctgctcaaaggtaataaggaaaaagccttcgacaacgctgcttttcgcatcggccagcccgttcacaaggactttgctttctgtccgtttaaggtcgtcgtgtcgtatcccgaacgtttcatcggcaaggccaacaagcctcgtgtgaagccatttttcactgaaattctcaagggccgaacttgggactttttctatcttcatgacccgattgagccagccagagacccgtacctcttgattccatccgcccagttcgaggttttcctcgaagaaatcaatctcaaactgaacactttcctcagaatccctgtttgtcccatgaacaaggacaagttctacatgaagtttggtgaaggcggcacccctcgtcctcgttacttgagacgatctttggatgcgacctctcttgacatccggccgtggcctgcagtcgaccccgaagacgtcagatccttcgaagctgcctcggcaccgcaaaagctcacctggaggtccaagatgcgaatcgttaagtccggcttcgcaccaaagaggacggcagatccagacaaggctgcgaagaagaagcgtcacagggaccaaatgctgcgcaacacattgggctacttgggtcttgcgggagatccggatggccacgacatcgttttcatctgtgtcgacgttgaagccattgaacgtaagccaaaccctatctctgaagttgggatttctatcctggacacacgggacatcaaaggcgttcaccctaaggatgctggtcgtggttggtggcctatgatcaagactcatcatcttcgagtgcatgagtatgccagtttacgaaactaccaatttgtcaaggggtgccctgactcttttgactttgggaatagcgtattcccttacaaggacgagcttcaagaagtcatcatgagcatctttaacccctatatttcctctcaacgggaacttgtcgtcgttgggcatgatgtgcgacaagacatcacctacttcaacgatataggtatagatctccgagcccttgcaggactgagagagcctatcgacacccagggcatgcaccaagcttggtgcagctcaaccaatggacgaggcctcgtcaccgtactcaacgatctgaacattccaaacaagaatctgcacaacgccggaaatgatgcccactacacgctctgcgccatgctaggaattgcggtggtagaggtcaatgggaacgagcaacagagcaacgaaatgcttaacaaggttgactga

SEQ ID NO: 333 - DNA, 4488 bp, Fusarium graminearum
  source 1..4488: mol_type = genomic DNA
atggacaccgactcgaccgacagcgaagatgatcgcgttcagtatcgcctgaccgtgaggccttcgaagcatcgaaagaatacagagaagaagcgcctgaacaagcaggttttgaaacaatacatgatagaacacgacagagaagcctatgccaaagattctgagaaaaagaagcgcggccccttcgctgaagcttccaccgacattacaccgcgagaatatcagatagaactcttcgaagccgccaaggagaagaatctcattgtggttttacctacaggcacaggttctggtaaaacactcatctccatcttattgctaaaatactacattcgaatcgaagtggaatctcgcgctcttggaaatccgaggaaggtggcctttttcttggtggaaaaagtagccctctgtgagcagcaataccgatttcttaaggaccagattttcggccacaacattgtcatgttcacaggcgataaccgcggcgtgaccaaggacaagaagtactgggatgatcagttttcctcaaacaaggttgtggtctgcactgctcacattttgctcgactgtctgaacaacggcttcattacaatggaccagatcaacctcctcatcttcgacgaagcccatcatgcaaagaagaagcatgattacgcgcaaattgtccgacgatattattattctaccgaaaagaacaagagacctcgcattctaggaatgaccgcttcccctgtggattccaaggctggagatgttgcagaactggcacttgaacttgagaaaacccttgacagcgagatcgcaacactctccgacaagatgatgcgacaggcgactgatttccaagttcatgttgaagagacagtcaaatacaacacacttggactaccagacgagaccaagacacagctttgggactcgatctctaagctagtatcgcgaaacaaggaattcaaggcgtctctcgacttcacaaaagaggcctccacaatcctaggaccctggtgtgcggaccgatactggcaagtcttgatcgacgatacagagatcaagcgactcgccgacaggactcgcatggcttttttcgggggtggagagaagttgttggcaagaggagaccaagcagaagaggctgtcagggaggttcaaaaggtcgtcgcagcccacgagtttagggcgatcagtcctcaatcgcaggaattgtcagctaaagtgaaatgtctacatgaaatcctggttcatgccttcacagtcgataacacaaagcgctgcatcgtttttgttgatcagagacacacagcttgcctcctttcggacctttacgaccaagtttcaatggcaattcccggtatgaatgcttcgtatatgattggtcaacaatctagcagcagcacccttggcaatatgtctctgcgaaagcaatgttcaacgctcaagaactttagggacggcgtgataaactgtctctttgcaacatcagtggcagaggagggaattgacattccgagttgtgatcttgttatccgatttgatctctatacttctgttattcagtatgttcaatccaaagggcgtgcgagacacgaatcttcacggtatatcaccatgctggaagacggcaacatgagacagattcgcagtctgaaacaagcagcgagagatgcaacagcccttcgagagttctgtctaagaatacctgccgatcgaaaacttcaagacgatgtatttgatgaggagacggaaagtcagatcaagcaaatacgttttaacgtgtacaaaatagaatcaacgggcgcacaacttacattcccctcaagcctcgagatactagctcgattcgttgcatccttgggtacagcagagagcagccatagcaaggctgaatatcacgtctacaaggtgggaacatatttcacagccgccgtcaatctaccgtccagttcccccatcgtctcccaaacaggctatccacaacgaagcaagcttctcgcaaaatgctcagcggcttttgaggtttgcaagaagctcatcaatggcaaacacattgatgatcatcttcagcctactttcaagaaacatttccacaaaatgcgcaatgctcgtgtgggaataagccctaacaagaagggtgagcatgacatgcgcctgaggcccaacgtttggagtatccgtggagaatggacacacttcttcccaacaagaattactcttgacagggattgtggagagaaaaacaggtcgttgattcttctttcgcgaagtccacttccaggactaccttcaatccctctattcttcggcaatggacgctcagccatcgttgaagtgacatgttctcaagaacctttacccatcacgaccgaggaagctgggggtttgactgctttcacactcaaaatctttgccgacgttttcagtaaagagtttgaggccacttgcgaccagtttccttaccttcttgcccccttggcaaaagacaccaatctaaacgaaatatcgcgaatcgactgggatactgtcaaccttgtcagagaccatgacagtctcgaatgggagaatgcgcccgacgatttctttttcgacaagcttgttgtagatccatatgatggagggcgcaagcttataatcaaaggcattgacaaatccaagaagccttctgatcctacaccggagggagtgcctgagtcgagaagtcgtgcttataggtctgcggaacaaaacattaagcagtacagcaacagtctgttttccaagtctcgactaacggcccagtggcgagacgatcaaccggttgtcaaagctgagcttctctcattgcgacgcaatctgttggacgagtttcaagtaaacgaggaaatcaacaaggattgcttcgtcattttagaacccctcaacgtgtcacctctgccaattgacgtcgtttccatggcactcaagttcccggcaatcatccacagaatcgattctgctctgatcgctcttgatgcatgcgaactattcgacctctctattccgccagcgctggcactcgaggcaatgaccaaagacagcgacaacactgaggatcatggcaagcaacaaatcaatttccaagctggcatgggttccaactatgaaaggttggaatttcttggagactcgtttctcaaaatggccaccacaatctccatttttgtactcaaacccaagagcaacgaatgtttgtaccatgtagagcgcatgctgctcatctgcaacaacaatctgttcaacacggccgtagattgcaagctcccagagtacatacgatccttggcattcgacaggcgaacttggtaccctgatcttacactcagaaaaggcaaagctttcaaggcaacagcgcgacagcgcttagccgacaaaagtattgcggatgtctgtgaagctctcattggtgctgcatacctctcaagcaaggatgacaatttgaacatggccgtcaaagctgtgtcacagatgtgcaaagcaaagtaccataccatgatggcttacgatgagtactacgcatctttcaaggttccagattggcagaaagccagtccaaacgccaaccagcgtagacttgtgcagaaagtggcagacgctaccgggtaccacttcaagtctgcgccgctgctccagagtgcattcacacacccttcttacgcgtattcagggaacgttccaaactatcaacgcctcgagtttctaggcgatgccctcatcgacatgaccatcgtcgaatatctctatcgcaactttcccctcgcagaccctcagtggttgacggagcacaagatggcaatggcctcgaaccaatttctcggttgtctgtgtgttaagctcaatctgcaccaccatcttctgttcaacacgtcgcagttcatcagcaaaattcgtgactatgtggccgaacttgagttggctgaagagactgcgcgccaagaggcagaagaagacgggactccaatgcgcatggacttttggctcaatgcgacaacgcctccaaaagcgtacgcagattcaatcgaggctcttatgggggccatgtttgtggattctgaattcgactattctgttgttgaggatttctttaccaagttcatcttcccgtactttaaagacatgtctctgtacgatacctttgcaaacaagcatccttacacatttctcaccaagaagatgcaacaggagatcgggtgcatgaaattctgtatgatttcagacacccgcgttcctgatgcagagcgtggcatggaagttatgaaagagtacgacatatattcagcctttcaagtgcacgaaagagtcatcacatgtcacgtatcaaagagtggaaggtacggtaagattgctgctgcaaagggggcactcgagttgttggagccgtatggcggtgatgtggtcgcgatgaagaagctgttgggctgcgactgcgactctgtaacagcagccatggcggagatggaccatggaacagctgtctaa

SEQ ID NO: 334 - DNA, 4356 bp, Fusarium graminearum
  source 1..4356: mol_type = genomic DNA
atgtcctcaagcgataaggtcatggcggacgcctcttccataccagactccgaggtcaaaacaatagcgtcgtcctcggtcgtcgagatctctgctacaggcgagaaggagataacgactcatatacctgtcgcagatacaccaatgtgctcagatgaccaggccaatgtgcaagagcaagacgaagaagttaagcctcagaaagtgacgcccaatccagaggtggtaaatccccgcggttaccagcgagagatgctggaacaaagcatcaaaaggaatgtcatcgttgcaatggacacgggaagtggtaaaactcaagtggccgtgatgcgcatccaacatgaactcgatacatgtgcaccagacaagattatctggttcttaggcaagacagtatcgctatgtgaacagcaatacagcgttgtccaaaggcaaatgccgtcggtatcgatgaaactgctaacggggcaattgaacatcgatgcatggtccgaggacgtctggccccgtatccttaatgggactcgtatcattgtctcgacctttgatatcctgcgagatgctttggaccatgcatttgtcaagatgaacatgctgtcccttatcgtcttcgatgaagttcataattgtgtaaagaatagctctggtcgaaaggttatggtgaatttctatcacgaacacaagaacgccggcatgcccgtgcctgctatcctgggtttaacagccagcccgatacagtcgaagtcaatccacgacgaaatccttgagctcgaggtcaccatggatgctgtatgcatcactccaacaattaaccggaaagaactcctccagcacgtcaacaagcccaatctttcccgagtattgtatgatgtggaagagcatccgactcgaacccccctaatgcagactctgcagtctgagtactcggcgatggacatcacccaggacccaagtattataaaggccaagcaacttatcgctaagggcgagaagactggacctgaaatactaagtatgttgatgaaacacaggaccttctctcagaagcagttaaagtccttatggaacaaaagcaaagacattcttgatgaactcgggccttgggctgctgacaagtacatctccgagttggtcagtctgtttctcaagagaatcgactcgccaatgacgtttaacgagtcctggagcaatgaggataggacctacctcgcaggtcatttgagacagatcgctgccagtccccatcagcccaaactaccagacagacacaacttggccgacaagacgaataaactaatccaggaactacttgcagcggatgaagatgtggtcggcattatattcgtcagatcaagggctgctgccaacgtcctttgtgctcttttgagggagcaccccgagattcgacagcgatatcgagtcggctctgtagtaggatccgcagccaccaagattcgaaagcaaaacatctacgagtatctgcccggcgcgactgccgatacattacgcgatttcaaaacaggcgccatcaaccttttggtctcgactagtgttcttgaagagggtattgatgtcgcagtgtgcaacctcgtcatatgtttcgatgagacaacgacactcaagtcccatatccaacgccgcggacgagctcgcaaacaaaaatcaaagatgatagtacttgctagatcttcatccgacgctcgggaatgggattccctagaaagagacatgaagagtcgttatgagcaggaaaggggagagttggacgctttagagatagaggctcgcactgaagcgacgtcctctttttcttatactgtgaaaaactcaggggctagattggacctcgagaattctcgccagcatctggaacatttttgtaacaaggttttccagcgagattacgttgatccgagacccgtctacattttccacaagaccgaactgggatcagcaccgccgactttcagcgcaacggtgactcttccctcgggtctgcctaagcacctccgaaggtgccaaggtggaggtggatggagatcagaaaagaatgcgatgaaggaagcggcttttcgtgcattcgtcatgctgcaccaagaaggtttggttagcgaccaccttcttcccctaaatgcagattcgaaagaagcagaagaagaggtgcagctaactgcgcccgagcttctatttgacccatggaaagacattgcacagcggtgggagaccacggctgagaaatggctctatgcttacgagttcgccgatcacgagtatgttactcctcttcatttcgagattgccttgcctgtgtgtcttccacgaccccgcgacatcacctttcatcctgaagagggacttaaatggcatgtcaaatgcacctcaatcaagaggatctccaatgatgaatgcttgggcttgccagatcatacgtcaaccctattggcgatgcattatggccaccgctggaacgtggaagatcgtgaccatgtgatcaaattcatatatgagaacaagaatctcacccgagatcaaattggatcggtacccttcggcgaaagcattgatgctctattggaaaagagagtcctggttcgggaccccaaaaatactcccttccactacgtcaaaatgatcccatcaaagcctccaaaagagcaagttcagcacccatttaatgaatacgaggaagcgccagaagaacagtatctagttgtggatcaatggacacgcaggtcggacctgttgcatgagataaaacccggtcaggggaagagctcttgcaccaaaccctaccgctgggttctcccgatttccagagcgactgttgatgaggttcctcggcgtgccgctaagtgcggtatgcttatcccttccatcattcacgaattggaggttcagctcatcgcgaatgaactgtcctcgacacttttggcgccagttggtatcacagatctgcaattggtgattgaagccatcagctcgcgtagcgctgcagagcctgttgactatgaacgtattgaatttttgggcgattcggttttgaagtattgcactgttattcaagcctactctgaacatcccttttggcccgaaggtctactcaaccatttcaaagaccgactagtctccaatacccgtttgactcgcatgtgccttgagacaggcctttccaagttcattttttccaaaacatttactggaatcaagtggagaccgctatatcgagacgaattcctagataagaagccagtcgatggtgtatcaaggtttgttggtccaaagactcttgctgatgtggtcgaggcacttgttggagcctcctaccaggatggaggaatcagcaaagctctggagtgcatcaaggttttcttgggcaccaagtgcaattggcatgatgacaaagtcgccagagacatactcttccgagcagcaattagcgacgtaccgttgccccccacgatggagcctttggaagagctcatcgggtacacatttcagaagaagtctctactcattgaggcaatgactcacgggtcgtatgcggctgatgggcagcagcgatcttatgaacaactcgagtttcttggagatgcggttcttgactacattgtcgtaacccgaatgttccaatctgaccccccagtgcccaatggacgcttacacatggtcaagactgccatggccaacgctgatttccttgcttttacaaacatgcaacatggactacgccggcctgaagttgaaataaatgagaacggcgaaccagtgcctacagaagtttcactgccgatatggaaattcatgcgtcatagctctccagagatgggtagaatcatgaatgagacccaggcccgatttgagagccttcaagaggaaatcaatgaggctaggacgaatggtaaacactacccctggacacttctcgctcgtcttcacccgaagaagttctactccgatattttcgaggctaccctaggtgccatttgggttgattcaggagatatcgaagtatgcacagcctttcttcacaagttcggcgtcttgccgtatcttgaccgaattctcagcgataatattcatgttcaacatcctaaagaggaactcgccaaactagcaatcgaccagaaaatgacgtatgattatacggctgttgatgggcctataaaggagtacctctgcacggccaaggttggagatcgcgtcgtgggagtcgtgtcaggggcactcaataaggctgaggcaatgaccaaggctgccgaagagggcgtgaattttttgaatggggagcagaaacgtgcagagaaggcggctcaggatgaaatggcgcgatttcttgttgccatggaactcatttag

SEQ ID NO: 335 - DNA, 156 bp, Verticillium nonalfalfae
  source 1..156: mol_type = genomic DNA
tcatgaccacagtcatgagttctcaccgaatgaagacccagggtcactgatcgactggagccatctgctgtcgaccaaagaggttgagtacttgccttgggatgaagatcacagtcccagcttctatcaaagcaagtttgtgattgatccatacac

SEQ ID NO: 336 - DNA, 156 bp, Verticillium nonalfalfae
  source 1..156: mol_type = genomic DNA
agaaggtcaacgatctactgccacaggcgacaaacaagaagccatatgctagggtttatccggcaccgtgggcgaaagtcgacacgattccattagatcatgcttactttggggcgttgatccctttcatttcacacattgtcgaggttcgactgg

SEQ ID NO: 337 - DNA, 2877 bp, Verticillium nonalfalfae
  source 1..2877: mol_type = genomic DNA
atgcccggcatcgctcgcaaggtcgtcatttgcgcggcgatcgacggcctcatcgtacagcctctgtcctccaaagggcagcgccctgcgcagcccgtccgcattggatatggtgacggtgccatttccccagcgccgcgggatcaactccctgatctcaccaagcccaacgcctcgttcgaggcttttggtgttgtgggcctgattaccctttcaaaactgaatttcctcattacaattacccgtcgacaccaggtcgctcaaattctaggatttcctatctacgttgtcaccgaggttgcgattacaccatgcgcctctcgccaggaagccgaggatgccgttcttcggacctccgtgcagctgcagacccgtactgatgatacggacacagaggattcggacagcgatagtaccatcgagttaatggcccacgctgtcgatgaggtcgacgatcagacgcagtcagagggctccatctcagcaggcgttaagagcaccgtcgccgaagacgtcatgagtcgtaaggggggctatggtcgattcgcccagcgctggttcagcagctccggctggatgcagggccagaaacgcaacgctggctggagctacacgacgaccgagttgcctcgagcttcgatggaccagcgcccggacctggagcccccggcggcatcgaaggtgcctctggaagaagaggacgacagagtcaacgaagcaaaggcgtcttctctgcttcccaaattgctccgaactgcgcaaattctttacgggtcatctaggagcttcttcttctcgtacgacgtagacataaccaggcactgggcgactcgagcacaatctccatctggtgagctgccactataccgtcgcgtcgaacctacattcttctggaaccgaaatacttctcagccattcattgattccggaaacgatgcgctagttctcccactcatgcagggattcgtcgggcagagggagtttaccatggataagagcccaccgcagcatgacgaagacgcgaataacgcactggaaatgtcaaacatgtctgctccaacatctccgccagggtcgccccctacagaagcgattcgcggctccctggatctccggggctcggaaaagaagttcctgattacggtgatttctcggcggtccattaagagagccggcctccgatatttgcgccgcggtattgatgaggatggccatgtggccaacgctgttgagacggagcaaattctgtctaactcttcgtgggatcagagctctaaaatttactcgttcctgcaaattcgcggcagtatacccctattcttcacccagagcccgtactcattgaaacctgcaccagtcatacaacactccacagaggcaaactttgaagcctctaagaagcacttcgagcgccttcaccgagaatatggtatgctgcaagtggtcagcttggtggaaaaacacaatgttgaggctacaatcggcaacgaataccagcatactgtcgcgaagctaaacgaaaccgtcttcagcgatcatacttctcaagtcccgttcgaatggtttgatttccacgcagcctgtcgtgggatgaagttcgaaaacgtcagcctccttctggatgccatgaggaccaagcttgatgagcttgggagcactgtcgaaaaggatggagagctgttccttcgccaacgtggagtgcttcggacaaattgcatggactgtctcgaccggacaaatgtttgccagagctcatttgcaaagtatatgctggaatcacagctcaaggctgagggatacgatctgagcatgcaagtagaccagcaatctgcatggttcaacacgctgtgggcggacaacggagactccgtgtcgaagcagtacgcttctacggcagccatgaaaggcgactacacacggtacaagactcggaactacagaggaatgctcaatgatcttggcttctcattgacaagattttataacggcatggttaatgactatttcagtcaagctgccattgacttcctccttggcaacgtcacttccatggtctttcaagagttcgaagctgaaatgatgacgaaagatcccgccatgtcgatgctcaagatgcgtgaatcagctatcgaattatgccagaaacgcgtcatctcagaccaaaaagaggactttgttggcggatgggtcatgctgagccctccaacgtctgacgttgtcaagtcacagacacccttcgaagaagtgattctccttctcacagatgctgccctttatctctgtcgctttgactggaagcttgacaaggtatcgtcgttcgaacgcgtcgacctcgcgcatatcgtgggtatccgcttcggcacttatattacatccacagtttcgcctggtcacaccgacgagagtaaaaacattgggttcgtggtgtcataccagcctggaaagactgacatccaacgcacaaatactcgtacgctttcgagcaactttatcaaacaacctggtcaggtcgaagaagagtcattggccgcggtggcggtcgacgagcctgcggcgctctcggggctgatgggactgctgtccggtcatcgacccaaaccccaaacaccgactcgaaagctcgccttcaaggcgccgtattcgcagtcgtcggccgcggtgacgggtgaggggccacgcttgagcgagacacagcaggttgtgagtatctgtgctgatgtcgagagactggccttcaaagcgcagcctggaaaggacgtgcctggaaccaagagcatcatcgagaggggtgacatcatctcattggaggacgcacaagcaaacacgacgattttagaccagctgagccactctatcaagaggcttgtttgggcgtag

SEQ ID NO: 338 - DNA, 4014 bp, Verticillium dahliae
  source 1..4014: mol_type = genomic DNA
atgtcagatctagcagtcggtcagatcgtccagctgaccgacggccgcaatggcgtcgtacgcttcgccggcaccacccatttcgcctcgggcgaatgggtcggcattgaattggaggatgactctggaaagaacgacggcagcgtccagggcgagcgctactttgactgttccatggggcgaggcatgtttgtgcggccgtcgaccctgaccattctcgcccaggctccagctccagctgcggcgccggccgccagacctaccgtcaggaagacgagcaggcccagcagcttcgtgcccggcacgggcagggtgtcgagcgtcaccgacccgagcatggccaagcggatgagtctgaatgctgctagtcccagcccggccccgcgcacatctcgacctgcgagccttgtacggtctcctacgaagtcgccaacgaagcaaattggttcgaccacctccagcaccgcaccctcccggaccggcacaccttcaaacgccaaaggcaccaccgccacgcgaactcgcccggcagtaggtgttcgcacctccatgggaccccctccgattccctccgcacgagtgagccgacagccatcaacatcgtcagcgacaggtcgccctcccgccaggccgctttccaatcgactctccctgtccggctcgcgcagcgtgcccaagccagaccccctccgacgcccatcgaccgattcgcaagcaggcagggagcccggctcggcagcagacagcggcgacgacggcaggagcagctcgccatctaagggagcggctgatctggcctcaccgcatgccacgagcccggtgcaagctcggaccaacgcgctcgagcggttgacctcgggcaggacggcgaccacgacggcacggtcgccagccacggcgtcgcctcgaacggccggcggcaacacggctgcggcgcgggagaacgaagacctcaaggcgaagctccgtgtcatggagcgcaagaggctggaagaccgggagaagctgaagcagctggagaagctccaaggcgaacgcgacaagtttgagtcgatcatccagaagctgcagacaaagtaccaaccccagcaaacggagaatgcagagctccgcaagcagatcaaggaggccgagacgcggttcgaggccgtggagcagatgcaggccgagcatgagacggccttggagctggccacgctggaccgtgagatggcggaagagacggccgaagtgctcaaggccgagctcgaagcgttgaagcagaaatcagaggagcttgagctcgaggtggaaatcttgcgagaggagaacgaggagtttagccagggcatgacgcccgaagagcggtcaagcacgggctggctgcagatggagaggacgaacgagcggttgagggaagcactgatacgattgcgcgacctgacccaggctcaagaggccgagcttcgagaccagatcaaggccctggagtctgacctgcaagactacagtaccgtgcaggagcagttcgcggcctccaaggaaaagctggcacagtctgaaagcgcggtcgaggatcttcgccaacagctcgacaatgctcttggagcggaggacatgattgaggacctcaccgagcgcaacatgagcatggccgaagagattgaggagctcaaggccgtcatcgaggatctcgaaaacctcaaggagatcaatgatgagctcgagattaatcacgtacaaaacgagaaggagatgcaggaggaactcgacttcaaggacagcgtcattgcggaacaggcccgacgagccggtcagcaagaggaagccctcgaagacatggagtacaccctttcgaggttcagggaactcgtcacgagcctgcagggcgaccttgaggacatgcgcgcatcgcacgctgtcaccgaggccgagtcggagcaattagacagcaagtcccgcgccatgatggacctcaacatgaagctccagatctcggctgccaagacacaggtcaagacgatcgacctggagcttcgccgtctggaggcgcaagaagcggagcagcacctcgaaatcgtcaagctcttcttgcccgagacctaccaggaggaccgcgactccgtgttggcgctccttcgcttcaagcgactggcgttcaaggccactctgctccagggcttcctcaaggaacgcgtcacgggccagccgcaccccggccacgaggacgacatgtttgccggctgcgatgccattgacaagctcacctgggtggcggccatgtgcggccgcttcatcaacgccatcagccactgctcgatcgagcagttccagcactaccagggcgctctgtttgagctggagccggtggagcgggcggtgaacgggtggatcgacggcctcaggagggatgaactcaaggaggccaagtgcgccagcgagctgcagcgctccattgcgctcatgacccatctcgccgaggttcaccttacggacgatctgcagagcttcgccgacgccatgcacatgcgcgctctcgtcgtgcaaagccatctggattcggccgccgcggccattacgaccgccagggccatggtccagagagtcatccccgagtctggcgaggacgacgagatggcacagcacttcagcaagaaggccgagcacgttgtcggccagacccgcagcaccaaggtcattgccagcaaggccgtgcgcgccctcgaggatctcaagaaccgatctctctcgctggctcgggacgacagcacgcaagaggcgtttgagcagtgcgaagaggccgcaaaggacctcgccgcactggcgcggcagattggcctcgacttgcacaagctgctgcacgaggagggcaggaccgagccatacacgcacacggaggtgcagaacacgatggcgcagacggccctgtcggccggttcgtcgaccgactcggatctcttctcgacctacgtgaccaagctccgggtcgtcacgcagcagatcacggaccttgcgggcctcagctctgacctgacgcagacgcaagagtttgagctcaacccggccccctggaagctccgctctcaagaactcaaggctctcaagacgatccccgtggatgccgaagaggagctccgccgcgtcaaggaggagcacaacgaggcgcgccgcacgattgcgcagcgcgacgagagcctcagcacggcgacgctcaagattgagacgctcgagtcccgcatgcgcgacgcgcaccaaaaggcgtcgcgcatcgccgaccttgaggcccagatcgagacggccaagcagcgcgcggcggcgctcaaggaggacattgaaaagggcgaccgcgagctcaaggcgctcgaggcggaccgcgaccagtggaagaagattgcgggcgacagcaaggcgttcgccggcgccaacgacgctggcgccgccaagtcgggccaggaacgggccgtggcgacggcgcgcgagatggacgccctcaaggccgacattgcgcacctgcaggcggcggtgcggtacctgcgcgaggacaaccggcgggcgcggctcacggagcaggccgactacgactggctcgcggcgccgctgcgcaaggcggcgtcgccggccgagcagcggcgcgcgctcgtcgtggccgagggccgcgacgcgctcggcgagctcgtgcggttcgcgacccaggccaaggtgtacgacctccaggacctgccgcaggacaagctcgcgtggcggccggccaagagcacgccgcagtaccacgccgcgcggcaggcggaggacctcgcggcctggaagggctggcgcgactcggtggtgcagaagacggaggtcgtcgccgggcgcaggggcggtggtgctccggacatgaagagggtcgaggcgctgcggcggagcgcggcggctgcgcgactgcagattcggctgccggggcccgacggcaagatggcgcggggcagcggacgggatgtgcagattgtcggatcgagggagtgggagggtctgcaggggcggttggccgtgtaa

SEQ ID NO: 339 - DNA, 1089 bp, Rhizoctonia solani
  source 1..1089: mol_type = genomic DNA
atgcgctccactgctactactttctcccttctctctttggctcctgccctgtttgcatccccagttgagcgttgtacaggtaccatatcatctttagatgatgttgccaatgcaatcaaatgtactactatcaatatcaactcgttcacagtacccgctggaaagactttccaactggatgcccccagtggcgctacagtcaacctattgggagacgttacgtttggcgtctctgcatgggcgggaccactattccaattgaccggaacaagcatcactttcaacggcaatggacataccttcaacggccaaggcgaacaatactgggacggtcttggaagcagtggaacgactaagcctcaccccatgatgaaaatcaaatcgtccggaacgttctcgaacgttgtagttaaaaactccccacagcaatgctttagcttcggcaacagcgcagctctgactgtttccaaggtcacagtcgacaattctgcaggagatgctgcgaacagcaagagtggtggtaaagctgctggtcataacacggacgggtttgatgtctcggtttccaatctcactatcgaagactccaccgtgcacaatcaagatgattgtctcgcaattaataaaggctccaacattattttccagcgtaacacatgcaccggtggacatgggatctcggtgggctctatcgactcggatgtcacagtcagtggcgtacagatccttaataatgtggtcacgaacaacgacaatggtcttcgcatcaagaccaaggctgctgccactggctccactgtatctggcattacctacaccggcaacaccgtcactggttgcaaaaagtacggtgtcatcattgaccagagttacccagatacccttggtactcctgggactggcgtcaaaatttctggcgtgaccttcagtggtaccaacaccgtttccgtcgttagtggagccaaggaggtcgaagtcaactgcggctcaggttcttgcacaggaacttggaattggtcgggtctcaaggtttctggtggatccgcgggggccatcaattactctggtatcaccggtttctcgctttaa

SEQ ID NO: 340 - DNA, 169 bp, Botrytis cinerea
  source 1..169: mol_type = genomic DNA
ttcgttccaggagttacacgcaaagatcacttcactggtggaccagcaaaaagatagtaaacatatcgggaaaatatcgatatatattctccgaattctacgagatatcagagcagaattacctagtaaccctgcactacaaaagtttggactctcacttgtctcatca

SEQ ID NO: 341 - DNA, 179 bp, Botrytis cinerea
  source 1..179: mol_type = genomic DNA
ttcgtgctctcgtcgaaagcaaagacaataaagaagaacaaatggagcgcgagttggagggattgcgaagaggaagtgttagcaatcctactacgcatcgtactagtgccatgagcagcggaactgtgactcaggataggaattctctccaagacaataagagcacagttgtaagctgg

SEQ ID NO: 342 - DNA, 168 bp, Botrytis cinerea
  source 1..168: mol_type = genomic DNA
acgttgttcaaagtgcagtggcaaagcgagcacttgaaatgcagttaaagaatgagggactagatgtcactctacaaattgatcaaactcaacaatggttcaatactttgtgggccgacaatggtgacgccatttctaagcaatacgcttctacagcagcattgaagg

SEQ ID NO: 343 - DNA, 259 bp, Sclerotinia sclerotiorum; identical to SEQ ID NO: 312
  source 1..259: mol_type = genomic DNA

SEQ ID NO: 344 - DNA, 200 bp, Sclerotinia sclerotiorum; identical to SEQ ID NO: 313
  source 1..200: mol_type = genomic DNA

SEQ ID NO: 345 - DNA, 230 bp, Sclerotinia sclerotiorum
  source 1..230: mol_type = genomic DNA
gcattggctgcgctgaagacgaaacctttattgaaagatgaaagtattcgagatttggagggattgagattagatgtatgtgagcggtggtttggtgatgaaattctttactttacaccttatgttcgacacgatgatttggaaggatcattagccgttgagacattaagaggttgggcgaagaaagcatcagaggtactactggaaggattcacaaagactcttcaagg

SEQ ID NO: 346 - DNA, 196 bp, Sclerotinia sclerotiorum
  source 1..196: mol_type = genomic DNA
tcaatgccagagattgacggttactcttcagcagcggaggatttctgtgaattgtgcgaggcatcaggtcatgatgttctacattgccccatgttcggtcctaatggtaatagtggcaactctagagaggagtctcctaaagagcaacgaacaggaaaagacgttgtcatggaaggactcaaactatcacccaaac

SEQ ID NO: 347 - DNA, 194 bp, Sclerotinia sclerotiorum
  source 1..194: mol_type = genomic DNA
gcttacatttccaagcaggaaatcaatggccgcttgactgaaataatcattaacaataccgctgtaaaatctagagatagaaagtcccatgtctgtcaaagcacccttgtaatcacgctttctagtacgagtgaagtctcccttcagggctgctgtagaggcatattgcttagagatagcatcgccattatcag

SEQ ID NO: 348 - DNA, 753 bp, Fusarium oxysporum
  source 1..753: mol_type = genomic DNA
atggagacggatatgcaccgagtcatccgcacccaggacctttctgacgaccactgccagtacttcatctaccagaccctccgcgccctcaaggccatgcactcagccaacgtgctgcaccgagacttgaagccctccaacctcctcctcaacgccaactgtgatctcaaggtttgcgattttggtcttgcgcgatccgctgcttcccaggaggacaactccggtttcatgactgaatacgtcgcgactcgatggtaccgtgcgcccgagatcatgttgactttcaaggagtacaccaaggctattgatgtgtggtcggttggctgcattctcgccgagatgctcagcggcaagcctcttttccctggcaaggactaccaccaccagttgacactcattctggatgtgctgggcacgccgactatggaggattactacggaatcaagtcgcgccgcgctagagaatacattcgatcgctccccttcaagaagaaggttcccttccgaactctattccccaagacctcggatctggccctcgacctgctcgagaagctcctcgcattcaaccctgttaagcgcattaccgtggaggaagctctgaagcacccataccttgagccttaccacgatcccgaggatgagccaacagcgcccccgatccctgaggagttctttgactttgacaagcacaaagacaacctgagcaaggagcagctgaagcagttgatctaccaggagattatgaggtaa

SEQ ID NO: 349 - DNA, 1074 bp, Fusarium oxysporum
  source 1..1074: mol_type = genomic DNA
atggccgagttcgtacgcgcccagatctttggcaccacattcgagatcacctcgagatactccgatctccagcctgttggcatgggagcttttggcctcgtttgctctgcccgggatcaacttaccaaccaaaatgtcgcagtcaagaagatcatgaagcctttcagcacacctgtgctcgcaaagcgcacataccgtgagctcaagctgctcaagcacctcaagcacgaaaacgtcatttctctcagcgacatctttatttctcctttggaagatatctattttgtcacagagctcctcggtaccgatcttcaccgattattgacatcgcgccctcttgagaagcagttcatccagtacttcctctaccaaattatgcgaggtctgaagtacgtgcattcggccggcgttgtccaccgcgatctcaaacccagcaatatcctcgtcaacgaaaactgtgatctcaagatttgcgactttggtcttgcacgaatccaggaccctcagatgactggttatgtctccacacgatactaccgagcccctgaaattatgctcacctggcaaaaatacgacgtcgaggttgatatttggagtgccggttgcatttttgctgagatgcttgagggcaaacctttgttccccggaaaagatcacgtcaaccaattctctatcatcactgagctacttggtacccctcctgatgatgttatcaacaccatcgccagcgagaacacactgcggttcgtgaagtcgctgcccaaacgcgagcgacagcctcttcgtaacaagttcaagaatgccgacgattcggctattgatctgctggagcgcatgcttgtcttcgaccctaagaagcgaataactgccacagaggccctgtcccacgactatctctctccctaccacgaccccacagacgagcccgtggcggaggagaagtttgactggagcttcaacgacgccgatctccccgttgatacatggaaaatcatgatgtactcggaaattctcgattatcataacgtggaagccggagttactaacatggaggagcaattcaacggacaataa

SEQ ID NO: 350 - DNA, 1965 bp, Fusarium oxysporum
  source 1..1965: mol_type = genomic DNA
atgtctgcctccgactcgatcccggcccccccggaggactggaaggatctgtcgacacctgcatctccaggctctgaagattcgtcagaacccagtacgccgctcgaatctcccggtcatgatagccccagtgagcctcctcgaagagtaccatctctgcgctccgtttccgatcctcgcaacatgaatccgaactcaactgctatgggtgttttaggcatggccagacgccctgtacaaacatcctcgagttttgctggaagtagtagtgcctcggtggaaaacagtataatggccaaagcccgagcattacatcaacaacgcatgcagaagggcatgtctcccgctggaatccccggaacaccctcggggtcatcacctacggccagcgtcgctaacggattccctaccaatctgggattgccgcccaatatgcaacgaccgcacgcaccacatgtaaattcagctcctgcgataacgaagccctcgctgagtgagagaagggccatgggcggcggcatgggcatgaagctgtctgatatgggtagacccagccctgtcaccgccactgggaagaaacgggggcctcctggaaagctttctgatatcacaggtgatgcgccaggtagtcaacaatccaacggaacagggggtgggcaggggtcaaaaatggacgatttcaagaaatatattgacacagagaagggttgggtgacctttgatggcgctgccacaatcacacggacaggtgtcaactttgccaatggccaaaccttcagcatatctcttgatgaagttgaagtcttgaccgagctgggtaaaggaaactacggaacagtctacaaggtcaagcatgccaagcgaagagtccctcgcttcggacaaggcctctcgagaaagccccttcctgttcagtattcgcagtcggacccttctcccattggatctgcggaagactccgccgagggcttgccagacacgaccgacggtacaacgggcacagtaatggcgatgaaagaaatgcgcctggagctcgacgacgccaaattcacaaccattctgaaggagctcgtcatcttacacgagtgtgtttctccgtatatcatcgacttttacggcgccttcttccaggaaggtgctgtttacatgtgtattgagtatatggatggcggatctatcgataagctgtataatggtggtatcccggagaatgttcttcgaaaaatcacatactctaccgtgatgggtctcaaatcactgaaggaggagcatagcattattcatcgcgatgtcaaaccaacaaacatcttggtcaatacacgaggccaggtcaagatttgcgattttggtgtcagtggtaatctggtagctagtatagcgcgaaccaacatcggctgtcagagctatatggcccccgagagaatctctggtggtggattcgcacaagccggtaattccgatggctcatacagcgttcagagcgatgtctggagtttgggcctgaccatcatcgagtgtgctaagggcgcttatccttacccaccggaggtctcttctactattttcagccaactgagtgctattgttgaaggtgaaccacctgctatgccagaggacacttactcggacatggccaaggattttgtgaaaagctgtcttcacaagattcctatgaagcggccaacctacgccatgctattgaaacatccgtggctcgtcgaatttacaaagcctcaaacaatcacggaagaagctgaggagggtgatggagttgatacggtcgcggaagctgttggtaaaattgatttgagctcatcaactgcagatactgaagtggcagattgggtcaatggcgttctacaacgagagaaagatggcctgaaggaggacgggcccttgaaaccagcactacacaatgcaccgcttgatagcgtcagtcctatgtcaagcccaaaggatgcatga

SEQ ID NO: 351 - DNA, 108 bp, Medicago truncatula
  source 1..108: mol_type = genomic DNA
gcnttyathcarytnwsnaarccntgyathwsngayaargartgywsnathgtnaaraaytaymgngcnmgntgymgnaarggntaytgygtnmgnmgnmgnathmgn

SEQ ID NO: 352 - DNA, 120 bp, Fagopyrum esculentum
  source 1..120: mol_type = genomic DNA
gcncartgyggngcncarggnggnggngcnacntgyccnggnggnytntgytgywsncartggggntggtgyggnwsnacnccnaartaytgyggngcnggntgycarwsnaaytgyaar

SEQ ID NO: 353 - DNA, 120 bp, Fagopyrum esculentum
  source 1..120: mol_type = genomic DNA
gcncartgyggngcncarggnggnggngcnacntgyccnggnggnytntgytgywsncartggggntggtgyggnwsnacnccnaartaytgyggngcnggntgycarwsnaaytgymgn

SEQ ID NO: 354 - DNA, 558 bp, Capsicum annuum
  source 1..558: mol_type = genomic DNA
atgatgaaygcnaayggnttywsnggngtngaraargartayathmgnaarcaycayytncaycarccnaargaraaycartgywsnwsnttyytngtnaarcayathmgngcnccngtncayytngtntggwsnytngtnmgnmgnttygaycarccncaraartayaarccnttygtnwsnmgntgyathgcncarggngayytngarathggnwsnytnmgngargtngaygtnaarwsnggnytnccngcnacnacnwsnacngarmgnytngarytnytngaygaygargarcayathytnwsnttymgnathathggnggngaycaymgnytnmgnaaytaywsnwsnathathwsnytncayccngargtnathgayggnmgnccnggnacnytngtnathgarwsnttygtngtngaygtnccncarggnaayacnaargaygaracntgytayttygtngargcnytnathaaytgyaayytnaarwsnytngcngaygtnwsngarmgnytngcngtncargaymgnacngarccnathgaycargtn

SEQ ID NO: 355 - DNA, 981 bp, Phaseolus vulgaris
  source 1..981: mol_type = genomic DNA
atgaaraaraaymgnatgatgathatgathtgywsngtnggngtngtntggatgytnytngtnggnggnwsntayggngarcartgyggnmgncargcnggnggngcnytntgyccnggnggnaaytgytgywsncarttyggntggtgyggnwsnacnacngaytaytgyggnaargaytgycarwsncartgyggnggnccnwsnccngcnccnacngayytnwsngcnytnathwsnmgnwsnacnttygaycargtnytnaarcaymgnaaygayggngcntgyccngcnaarggnttytayacntaygaygcnttyathgcngcngcnaargcntayccnwsnttyggnaayacnggngayacngcnacnmgnaarmgngarathgcngcnttyytnggncaracnwsncaygaracnacnggnggntgggcnacngcnccngayggnccntaygcntggggntaytgyttygtnmgngarmgnaayccnwsngcntaytgywsngcnacnccncarttyccntgygcnccnggncarcartaytayggnmgnggnccnathcarathwsntggaaytayaaytayggncartgyggnmgngcnathggngtngayytnytnaayaarccngayytngtngcnacngaywsngtnathwsnttyaarwsngcnytntggttytggatgacngcncarwsnccnaarccnwsnwsncaygaygtnathacnwsnmgntggacnccnwsnwsngcngaygtngcngcnmgnmgnytnccnggntayggnacngtnacnaayathathaayggnggnytngartgyggnmgnggncargaywsnmgngtncargaymgnathggnttyttyaarmgntaytgygayytnytnggngtnggntayggnaayaayytngaytgytaywsncaracnccnttyggnaaywsnytnttyytnwsngayytngtnacnwsncar

SEQ ID NO: 356 - DNA, 1020 bp, Oryza sativa
  source 1..1020: mol_type = genomic DNA
atgwsnacnccnmgngcngcngcnwsnytngcnaaraargcngcnytngtngcnytngcngtnytngcngcngcnytngcnacngcngcnmgngcngarcartgyggngcncargcnggnggngcnmgntgyccnaaytgyytntgytgywsnmgntggggntggtgyggnacnacnwsngayttytgyggngayggntgycarwsncartgywsnggntgyggnccnacnccnacnccnacnccnccnwsnccnwsngayggngtnggnwsnathgtnccnmgngayytnttygarmgnytnytnytncaymgnaaygayggngcntgyccngcnmgnggnttytayacntaygargcnttyytngcngcngcngcngcnttyccngcnttyggnggnacnggnaayacngaracnmgnaarmgngargtngcngcnttyytnggncaracnwsncaygaracnacnggnggntggccnacngcnccngayggnccnttywsntggggntaytgyttyaarcargarcaraayccnccnwsngaytaytgycarccnwsnccngartggccntgygcnccnggnmgnaartaytayggnmgnggnccnathcarytnwsnttyaayttyaaytayggnccngcnggnmgngcnathggngtngayytnytnwsnaayccngayytngtngcnacngaygcnacngtnwsnttyaaracngcnytntggttytggatgacnccncarggnaayaarccnwsnwsncaygaygtnathacnggnmgntgggcnccnwsnccngcngaygcngcngcnggnmgngcnccnggntayggngtnathacnaayathgtnaayggnggnytngartgyggncayggnccngaygaymgngtngcnaaymgnathggnttytaycarmgntaytgyggngcnttyggnathggnacnggnggnaayytngaytgytayaaycarmgnccnttyaaywsnggnwsnwsngtnggnytngcngarcar

SEQ ID NO: 357 - DNA, 759 bp, Solanum chilense
  source 1..759: mol_type = genomic DNA
atgaarttyaayathgtnwsnccngtngcnytnwsntgyytnttyttyytnttyytnacnggnacnytngcncaraaygcnggnwsnathgtnacnmgngarytnttygarcaratgytnwsnttymgnaayaaygaygcntgyccngcnaarggnttytayacntaygaygcnttyathgcngcngcnaaywsnttyccnggnttyggnacnacnggngaygayacngcnmgnaaraargarathgcngcnttyttyggncaracnwsncaygaracnaarggnggnwsngcnggnacnttyacnggnggntaytgyttygtnmgncarathgaycarwsngaymgntaytayggnmgnggnccnathcarytnacncaycarwsnaaytaygarmgngcnggncarggnathggngtnggncargayytngtnaayaayccngayytngtngcnacngayccnathathwsnttymgnacngcnathtggttytggatgacngcncargayaayaarccnwsntgycayaaygtnathathggncartggacnccnwsnccngcngayacngcngcnaaymgngtnccnggntayggngtnathacnaayathathaayggnggnytngartgyaayatgggnccnaayacngcngtngarwsnmgnathggnttytaymgnmgntaytgyggnatgytnaaygtnccnacnggngaraayytngaytgyaayaaycaraaraayttygcncarggn

SEQ ID NO: 358 - DNA, 998 bp, Hordeum vulgare
  source 1..998: mol_type = genomic DNA
ctacgacagtagcgtaagcgtaacaccgagtacgtactctgtgctttgttggctcgcacaatgagatcgctcgcggtggtggtggccgtggtagccacggtggccatggccatcggcacggcgcgcggcagcgtgtcctccatcgtctcgcgcgcacagtttgaccgcatgcttctccaccgcaacgacggcgcctgccaggccaagggcttctacacctacgacgccttcgtcgccgccgcagccgccttcccgggcttcggcaccaccggcagcgccgacgcccagaagcgcgaggtggccgccttcctagcacagacctcccacgagaccaccggcgggtgggcgactgcaccggacggggccttcgcctggggctactgcttcaagcaggaacgtggcgcctcctccgactactgcaccccgagcgcacaatggccgtgcgcccccgggaagcgctactacggccgcgggccaatccagctctcccacaactacaactatggacctgccggccgggccatcggggtcgatctgctggccaacccggacctggtggccacggacgccactgtgggctttaagacggccatctggttctggatgacggcgcagccgcccaagccatcgagccatgctgtgatcgccggccagtggagcccgtcaggggctgaccgggccgcaggccgggtgcccgggtttggtgtgatcaccaacatcatcaacggcgggatcgagtgcggtcacgggcaggacagccgcgtcgccgatcgaatcgggttttacaagcgctactgtgacatcctcggcgttggctacggcaacaacctcgattgctacagccagagacccttcgcctaattaattagtcatgtattaatcttggccctccataaaatacaataagagcatcgtctcctatctacatgctgtaagatgtaactatggtaaccttttatggggaacataacaaaggcatctcgtatagatgctttgct

SEQ ID NO: 359 - DNA, 978 bp, Oryza sativa
  source 1..978: mol_type = genomic DNA
atgmgngcnytngcngtngtngcnatggtngcnacngcnttyytngcngcngcngtncaygcngarcartgyggnwsncargcnggnggngcngtntgyccnaaytgyytntgytgywsncarttyggntggtgyggnwsnacnwsngaytaytgyggngcnggntgycarwsncartgywsngcngcnggntgyggnggnggnggnccnacnccnccnwsnggnwsnggnggnwsnggngtngcnwsnathgtnwsnmgnwsnytnttygaycaratgytnytncaymgnaaygaygcngcntgyccngcnwsnaayttytayacntaygaygcnttygtngcngcngcnwsngcnttyccnggnttygcngcngcnggnggngaygcngayacnaayaarmgngargtngcngcnttyytngcncaracnwsncaygaracnacnggnggntgggcnacngcnccngayggnccntaygcntggggntaytgyttyaargargaraayggnggngcngcnggnccngaytaytgycarcarwsngcncartggccntgygcngcnggnaaraartaytayggnmgnggnccnathcarytnwsntayaayttyaaytayggnccngcnggncargcnathggngcngayytnytnggngayccngayytngtngcnwsngaygcnacngtnwsnttygayacngcnttytggttytggatgacnccncarwsnccnaarccnwsntgycaygcngtngcnacnggncartggacnccnwsngcngaygaycargcngcnggnmgngtnccnggntayggngtnathacnaayathathaayggnggnytngartgyggncayggngargaygaymgngtngcngaymgnathggnttytayaarmgntaytgygayathytnggngtnwsntaygaygcnaayytngaytgytaywsncarmgnccnttyggnwsn

SEQ ID NO: 360 - DNA, 1098 bp, Brassica juncea
  source 1..1098: mol_type = genomic DNA
aaataaaattcatcaaaataacccatccaaaagagtccaaaataacaaatgacaattccacctttattttaacaaaaattatattcaaactagacaaacatgataattgtgatatagtttctcaacaagtttcaaaaacaattatagttttccaccataattgtaaacacacatattttcgccaaaaccataaaatatatattctcgctaaaacaacaagaaaaacatttgtccgtgaattccatctcttctcataaacttcatcttccatcgtatcaagcgaacccatcctattggggggtatgtgattcatgagccttaattagggtggtacagtcagcgactcctgagcttcagagagggtagtccagcagctagtgactctgctagagatagtgtggcccagctagtgagtagtgactcatgaggtagagagagggtggtccatcatatatcgtgttagacaaattctatatagacaatgaggtaaatgtgggatatgaaggtggtggcaaattttagaacaattagtatttaagtatagtaaacataaaaacaaaccagcactgcttatcttcgattctatcaagcgaacccaccttatattgaattaatttatggtagcagtgattcgtgaacgtcagagagggtggtccctctagtgactcatgagctagagagagggtggtccagctatcgtgtagaaatattctatagaccattagataaacgtgccaaatgaacttggtggtgacaaaatagaagtttagaatgtttgggttcccggtaaaaaggtgaaaccacctttttttttttttttttttaccaacgttgaattggcctaatgataaaagggttacgcttgtaactaccgccacccaggtttaattcacggtgggagagactatttataatgcttaggtttctggcaaagaagtgaaaccactttttttctttccagaaaaaatagaagtctagaaaacataaaaacaagtatataaaattcgatgtgatttaacactaactgattttgtacattgcatgttgctatatatacccttacttgcctcttaaaacaaccatacagctcagagaaac

SEQ ID NO: 361 - protein, 36 aa, Medicago truncatula
AFIQLSKPCISDKECSIVKNYRARCRKGYCVRRRIR

SEQ ID NO: 362 - protein, 40 aa, Fagopyrum esculentum
AQCGAQGGGATCPGGLCCSQWGWCGSTPKYCGAGCQSNCK

SEQ ID NO: 363 - protein, 40 aa, Fagopyrum esculentum
AQCGAQGGGATCPGGLCCSQWGWCGSTPKYCGAGCQSNCR

SEQ ID NO: 364 - protein, 186 aa, Capsicum annuum
MMNANGFSGVEKEYIRKHHLHQPKENQCSSFLVKHIRAPVHLVWSLVRRFDQPQKYKPFVSRCIAQGDLEIGSLREVDVKSGLPATTSTERLELLDDEEHILSFRIIGGDHRLRNYSSIISLHPEVIDGRPGTLVIESFVVDVPQGNTKDETCYFVEALINCNLKSLADVSERLAVQDRTEPIDQV

SEQ ID NO: 365 - protein, 327 aa, Phaseolus vulgaris
MKKNRMMIMICSVGVVWMLLVGGSYGEQCGRQAGGALCPGGNCCSQFGWCGSTTDYCGKDCQSQCGGPSPAPTDLSALISRSTFDQVLKHRNDGACPAKGFYTYDAFIAAAKAYPSFGNTGDTATRKREIAAFLGQTSHETTGGWATAPDGPYAWGYCFVRERNPSAYCSATPQFPCAPGQQYYGRGPIQISWNYNYGQCGRAIGVDLLNKPDLVATDSVISFKSALWFWMTAQSPKPSSHDVITSRWTPSSADVAARRLPGYGTVTNIINGGLECGRGQDSRVQDRIGFFKRYCDLLGVGYGNNLDCYSQTPFGNSLFLSDLVTSQ

SEQ ID NO: 366 - protein, 340 aa, Oryza sativa
MSTPRAAASLAKKAALVALAVLAAALATAARAEQCGAQAGGARCPNCLCCSRWGWCGTTSDFCGDGCQSQCSGCGPTPTPTPPSPSDGVGSIVPRDLFERLLLHRNDGACPARGFYTYEAFLAAAAAFPAFGGTGNTETRKREVAAFLGQTSHETTGGWPTAPDGPFSWGYCFKQEQNPPSDYCQPSPEWPCAPGRKYYGRGPIQLSFNFNYGPAGRAIGVDLLSNPDLVATDATVSFKTALWFWMTPQGNKPSSHDVITGRWAPSPADAAAGRAPGYGVITNIVNGGLECGHGPDDRVANRIGFYQRYCGAFGIGTGGNLDCYNQRPFNSGSSVGLAEQ

SEQ ID NO: 367 - protein, 253 aa, Solanum chilense
MKFNIVSPVALSCLFFLFLTGTLAQNAGSIVTRELFEQMLSFRNNDACPAKGFYTYDAFIAAANSFPGFGTTGDDTARKKEIAAFFGQTSHETKGGSAGTFTGGYCFVRQIDQSDRYYGRGPIQLTHQSNYERAGQGIGVGQDLVNNPDLVATDPIISFRTAIWFWMTAQDNKPSCHNVIIGQWTPSPADTAANRVPGYGVITNIINGGLECNMGPNTAVESRIGFYRRYCGMLNVPTGENLDCNNQKNFAQG

SEQ ID NO: 368 - protein, 326 aa, Oryza sativa
MRALAVVAMVATAFLAAAVHAEQCGSQAGGAVCPNCLCCSQFGWCGSTSDYCGAGCQSQCSAAGCGGGGPTPPSGSGGSGVASIVSRSLFDQMLLHRNDAACPASNFYTYDAFVAAASAFPGFAAAGGDADTNKREVAAFLAQTSHETTGGWATAPDGPYAWGYCFKEENGGAAGPDYCQQSAQWPCAAGKKYYGRGPIQLSYNFNYGPAGQAIGADLLGDPDLVASDATVSFDTAFWFWMTPQSPKPSCHAVATGQWTPSADDQAAGRVPGYGVITNIINGGLECGHGEDDRVADRIGFYKRYCDILGVSYDANLDCYSQRPFGS

SEQ ID NO: 369 - protein, 135 aa, Arabidopsis thaliana
MEGKTVIFSVLVMGLVISQIQVEAQKTCCPSQSTRKEFEDCISEGNLQILCSAESGCRDTYVGYCPSGFPYGSLTNSGDVVNVYCKLGCVSSLCGALTSLQKLDTSGKVNVAVERCTKACSTICTKGSKTAVETV

SEQ ID NO: 370 - protein, 61 aa, Vigna mungo
PNPKVFFDMTIGGQPAGKIVFELFADTTPRTAENFRALTTGEKGVSRGRKPLHYHGSIFHR

SEQ ID NO: 371 - protein, 512 aa, Camptotheca acuminata
MENLYYCLALLLSILFIFRHFFRHSSKLPPSPFALPIIGHLHLIRNSLHQVLECLASQYGPILFLKFGTRSILVVSSPSAVEECLIKNDIIFANRPRSMILDLSSFNYSIFSWAPYGHYWRSLRRLAVVELFTSRSLQTSSNIRKEEIHNLLCHLFKFSKSGTQKLQLKYWFSLLTFNIITRLVAGKRCVRDAVAGTDSGKQILEDLEGKFTSKMPFNMCDFFPILRWFGYKGLEKILITLHKERDEFMQGLIDEVRRKRTCSANINSVTNRAKTTLIEALLSLQESEPDFFSDTIIKSIISDMFFAGPETSTITLEWAMSLLLNHPEVLGKLRAEIDDHVGHGRLLDDSDLGKLPYLRCIINETLRLYPPTPLLLPHCSSEDCIVGGYEIPQGTILWVNAWAMHRDPKLWEEPTKFKPERFEGMEGRERYKFMPFGIGRRACPGASMAIRTVSLALGALIQCFEWENVGPDKREMSQGRLTLPKAESLEAVSIPRPSAVKVLSQLEGTCFR

SEQ ID NO: 372 - protein, 105 aa, Nicotiana alata
MARSLCFMAFAILAMMLFVAYEVQARECKTESNTFPGICITKPPCRKACISEKFTDGHCSKILRRCLCTKPCVFDEKMTKTGAEILAEEAKTLAAALLEEEIMDN

SEQ ID NO: 373 - protein, 266 aa, Triticum kiharae
MGVKGGGVLWCLLLAGLLLLAVACAAERDTEKEKEEEIRWCEEDCDWKAGQDTGKARECKEQCERRRHGHELLQEDGDSFDSCVSKCRGHGGWWGKERWERCRQICRQSQEGEGGDEGDNTDDRCERMCQHYHDRREKKQCMKGCRYGESDLLSSDDGHEHGDRCQTQCKRLRPGSYDRQQCIEKCQCQQKEDEEVMNHHGGGGHGHGGSSCEQKCQQRYRHEYDKQQCVRDCKSGGGGGAGGRGREGDERQHGREMVIEAILEEV

SEQ ID NO: 374 - protein, 320 aa, Euonymus europaeus
MKYLWVFIVFSIAVLSHACSAQQCGRQAGNRRCANNLCCSQYGYCGRTNEYCCTSQGCQSQCRRCGVRTVGEIVVGDIGGIISKGMFNNILKHRDDDACEGKGFYTYEAFVAAARSFPAFGSTGDDATRKREIAAFLAQTSHETSAGWPSAPDGPYAWGYCFVRERNPPSKYCDTTTPCPKSYYGRGPIQLTWNYNYEQAGRAIGADLLNNPDLVATDAVISFKTAIWFWMTAQSSKPSCHDVITGSWRPSASDNSVCHVPDYAVVTNIISGEIEYGKSRNPQVEDRIEFFKRYCQILGVSPGKCYEERTFVSGLMMETI

SEQ ID NO: 375 - protein, 305 aa, Euonymus europaeus
MKYLWVFIVFSIAVLSLACSAQQCGRQAGNRRCPNNLCCSQFGYCGRTNEYCCTGFGCQSNCRRCGVRTVGEDVVGDIGGIISKGMFNNILKHRDDDACEGKGFYTYEAFVAAARSFPAFGSTGDDTTRKREIAAFLAQTSHETSGGRPSAPDGPYAWGYCFVKERNPPSKYCDTITPCPKSYYGRGPLQLTWNYNYAQAGRAIGVDLLNNPDLVATDAVTSFKTAIWFWMTAHSSKPSCHDVITGSWRPSASDNSVRHVPDYAVVTNIINGEIEYGKSRNPQVEDRIEFFKRYCQILGVSPGKF

SEQ ID NO: 376 - protein, 38 aa, Taraxacum officinale
VAKCTEESGGKYFVFCCYKPTRICYMNEQKCESTCIGK

SEQ ID NO: 377 - protein, 44 aa, Taraxacum officinale
GGKCTVDWGGQGGGRRLPSPLFCCYKPTRICYLNQETCETETCP

SEQ ID NO: 378 - protein, 42 aa, Taraxacum officinale
ANKCIIDCMKVKTTCGDECKGAGFKTGGCALPPDIMKCCHNC

SEQ ID NO: 379 - protein, 49 aa, Triticum kiharae
RTCQSQSHKFKGACFSDTNCDSVCRTENFPRGQCNQHHVERKCYCERDC

SEQ ID NO: 380 - protein, 47 aa, Echinochloa crus-galli
RECQSQSHRYKGACVHDTNCASVCQTEGFSGGKCVGFRGRCFCTKHC

SEQ ID NO: 381 - protein, 47 aa, Echinochloa crus-galli
RECQSQSHRYKGACVHDTNCASVCQTEGFSGGKCVGFRGRCFCTKAC

SEQ ID NO: 382 - protein, 30 aa, Amaranthus caudatus
AGECVQGRCPSGMCCSQFGYCGRGPKYCGR

SEQ ID NO: 383 - DNA, 3666 bp, Oryza sativa
  source 1..3666: mol_type = genomic DNA
atggaggccacggcagtgagcattggcaggtccgtgctgaagggagcgcttggctttgccaattccaccttggtggaggaggtttccctgcagctcggcgtccagcgcgaccaggcgttcatcagggacgagctggagatgatgaactccttcctgatggccgccaatgatgagaaagatgacaacaaggtggtaaggaccttggtgaagcaggtccgcgacgtggcctacgacgtcgaggactgcctccaggacttcgccgtccgcttggggaggaagagttcatcctggtggctcagccctcacacgctgtgggagcggcgccgcatcgccaagcagatggaggagctgaggggcaaggttgaggatgtgagccagaggaacatgcgttaccaactcatcaagggctccaagcctaccgtagctaccaatgtcgcacccagcagcactgcccgtgcgaccatgtctggcgcgcatgaagaacgatggcagcatgagaaggcaatagatcatctggttcggctggtcaaaaccaaagtcgatgaacgtagagtgatcgcggtgtggggaacaagtggtgatatcagggaaatgtccatcgttggaggggcctatgatcatctcaagagaagcaacaagtttgagtgctgtgcctgggtaaatttgatgcatccactgaacccaacaaagctcctgcaaaccattgttaggcaattctatgtaagatctcttcaggaggctggcaaagcaactccgtcgtgtcaaattctgagtagcatgttgataaaggaagatcagggtttggggtttagggttctgaggagcatgctgatgaaggaagatcatttgaatgatgagttcaataaatatttgagtgacaagtgctacctcattgtgcttaatgacctatcgtccgctgaagagtggaagcaaattaaaatgctcttcccagacaacaagaaaggaagccgaatcatagtgttcacacaacaagttgaagttgcaagcttttgcgctaggacagaggaggtggcacccgagcacatgcagttgtttgctgatcagactctttatgcttttcactgcaagggtgctaaagatggagtagattcaatggaggactcatctaacttaaacgaagacactacatacaacgctgtagaaggaaagagccttactcgcacatattcaatggtaactgctttcaaggaatctgagatcgttgggcgagttgatgaaataaaggagattattgaactgatttcaaaaggtagcaaccaacttgagaagatctcagtgtggggaatgggtggtattgggaaaaccactctaattcaaaatgtctaccgaagcgaaaaggttaagaagatgtttgataagcatgcatgtgtcacgatcatgcgcccgttcaatcttaatgatcttcttatgatcttagttaggcaactagaagattcaaaaacttctggaggaaaggagttggttagcattttacaaggaaagaaatacttgattgttcttgatgatgtattattcacaacagaatgggatgctatagaatcatatttcccagcaacggaaacaggaagccggatcataataaccacaaggcatgaaagtattgctaagcattgttcaggggatcaacaaggaaaaatgtatcaactcaatcgtctaggagacaacgatgcaaagaacctctttgcaaagaaggtatttaaggagtcagtaaatttggatcaacaagatcttgaattgatcaaagaagcgaaaccgattctaaagaagtgcaatggacttcccctcgcaattgtcaccataggtggtttcttggcaagcagccccaaaactgctttggagtggagaaaattgaatgagcatattagtgcagagttggagacaaacccagggcttgaggccatcagagctgtccttaatataagctacgatggattaccttatcacctcaagtcttgcttcttgtatctgtccatctttcctgaagatgacaagattagccgggaacgtttggtgcgccgatggtgtgcagagggttactcaagggagctatgggacaaatctgcagaggaaatagcaaacaactacttctttgaactcatagacagaagcatgatcctaccaactcaaaaattaacttacaacaatagacctgattcttgccaggtccacgatatcatgcgcgagatagccatctcgaagtcaaaggaggaaaatcttgttcttagactcgaagggggtcataggctacacaatcatggcatagttcgacatctttccattacaaacagcggcgaggatcgggagacagattttgctgaattggagacaacagtagacatgtcccgaataagatcattaacagtgtttggggagtggaagccatttttcatttctgacaagatgaggttgttgcgtgtgctcgacttggaagacacagaaggtgtacgtaatcaccatattaagcaaattgggaagctccttcaccttagatacctttctctaaaacgatgtagggagattgcttacctgcctgattccttaggtaacctaaggcaactggagatactagatatcagaggtacgctcatagtcaggctgccaaagaccatcatcaatcttcgcaagctaaagtatctccgtgctgttccaaacatagacgacatagcagagattctaattctaccagagctcatgaggaacaggctatgcatttctactgtttcgttgctggggctttgtctgctatgctcagcaagtgcgattggtaagtttgatgaagagactagtacccgtgacctctgcaccatgtggtgctgcagtattctccctagcattgctatgcgcctccaagggaatggtgtagtagcaccaagagggctgaggatcaggagactgacagccctgcacacgctaggtgtggtggacatttcatggcagccatcaattttacaagatatcaagaggctcatccagctgcgcaaattggaagtgaccggtgtcaacaagaaaaatagcaaaaagcttttctctgcccttgccgctctcagccaactagaatcattgtcactgttctcgaagtggaagccaggtctctggggctgtctggatgctgaagaaaagttttcgccacctaagaatctcaagactctgaagcttcaaggcaacctggttgagctgccaaaatggatcgggaagctcaacaatcttgttaagctgaagctatcaaaatccaggctcaaggatcatgatgctgctatacaagtccttggtatgctaccaaacctgaccatcctatgcctgccgcgcaagtcatttcactcgcttgagggtggtgaactcaatttctcggagggatctttcaaaagcctggtggttctcgagctccacttcggtgggagcaaacgcgtcaagtttcaacaaggagcattccacaatcttgagctactggagctttcaggttacattgataaagtcgaaactaagttctctgggctagaatttctcccaggaatcaaggaagtctggctccagggtgaattttattccagaaacgagcaagccgcacgaagattgaaagaggacttgctggcacagctttctgagaatccaaagaaaccaatcctgaagactagcgggtatttttag

SEQ ID NO: 384 - DNA, 9576 bp, Oryza sativa
  source 1..9576: mol_type = genomic DNA
ggaaatactagaatgacttacattgtaaaacagagaaagtatgattatctaaactctcagatagtctattgtaatcattgtatgcatgacatcagcttgtgtcaaagctgcagctttgttggatcaaccagaatttactagttctaaaaaaaacagaatttacttagatcctgctgaaagacttcgggccaattagaagcccagtatttggcccaaaactggtgtaaactacaggcccataatagaaataagttcactggaggtcccccaacttaacaccgagatttttttgaggtcccttaaccataaaccagaaatgcgtacccctaaactatgtaaaaccgtcaaaaaaaaaaaggtcccgaggcagtatagttgctcggtttcgctgacgtggcatcctagtcagcaaaaaaaattaaaataaatatgtggggcccacatgtaagtgagagaaaatggtgtgggccccacatttctcctttcttttctttttctcttctcttctctcccgattttctcgagtgggcgcggcggcagaggggagagaggtgaccggcggtggagcgggggtggtgggagaggggggctggcgcgacgtcggcggcgggagaaaaggagaggaggcggctggcgcgacggcgagctcggacggcaacggcgggaggaggaggaggagaggaggcagtcggcgctgtaaaacgcgcatgggatgcggcggatgatgtcgagcgggacggtgtcctcatcaccatcttcctcatcgtcatcgcagtctgcgggtgccgggcggagcggtttgggagggagggggaggcggccagcgagcccgttcgagctcgcccggcctgcgcgcgagctcgcccctcccatagcttggtgtgctggggacgacgacgaggaaagggggagaaaggaattgacggccgatgatagcaatggcgggcgagcgcggcgccgggctgctcatgctcgccgaccaggcccccggcttcgccgcactcgtccgccgtgctcgcccacgcactcgccgacctccgctccacccgccgctcctgcccgctgcccgctgcccgccggcctccctgactgaagaagagaagagagaaattaaagagaagagaaggagaagaaaagagaagagaagaaaaaaagatgtgtagctgacatgtgggccccatgtacttttttattttttttgctgactagaatgccacgtcagcgaaaccacccatatatactgtcataggaccttgagtgcatagtttgtgtgagtttagggatacacatttctcgttttgtagttaagggacctcgtaaaaatctcgctgttaagttgagagacccctccggtgaacttattcccccaaatattttctccatgctctgggctcaaacgcactcttggatgggccgtgtaatctacaccatttctggcccaatccaacgaaggtagctccagactcctaactccgccgccgcatgcccaatcctcgccggccgccgctgccatctcccttcccccaccgccaccgtcgccttctccgttcccccaacaaaggctcagtagcagcagccgcggcgcggagagcagaggccttggagggcctgcagaggagcgcccgcgtcgacgaagacgacatcagcaggcagtggacatggcgactgcgaatgctatcgccgacgtgggagcttcaggcgaggatgcgtggccttcatcagctgctgctcccttacctgctctggtttgtcattgtgttggttcgtggtttggggatatcaggatggggaaggggaatgggtttcgtgccatgttgttctattgtgcaatttgatgttctcttgtcgaatttcatggtgattcaatctgcatctgtgttattggttgtcaagcaaacattttatttctttcgagatgggtgtttcatctgaaattggtgtgtctgatgatgtgaccttgtgcaaatcattgtttcattttcttctattccacagagatttttttgtttagagtttattctaccatcttcttaccttttgaatgctatgcaccacagatttctgatttttacacattcaatcacagtgccgacccttggcgaatttaaaattttctcaccgtcaaaatttaatcaaacatctgatctaacagtagtagcgccagcacggctggtatttaaggcagaaagaaaggttgcgagggcgaggagttggtgatgatctgccggtcgtgtcgtgactttaggctataaaagatagctgtttggattaacccaaccaatgaagcgaatcatcgatggccgatagcgagattatatccaactaatgaagagaatcaactttaatcttttgtgagctacaagtttcgtggtgaaggcatatactaataccaccatcatggctgcagcgaatcaacgagatgcatttgtcttgcacatttcccaccggatactttgccatccatggctttatctcctccatgattgtatccccttcttcctcaacaaggaacgatcgatcattgtttgcttctttctctgacgacactttggtgcaagtgaaaggctctttcctggaactcgtcccgtgagctccttcctggctacatcctccttaattccttgccgatttccggcttcgtcttcactatcgtcagttcatttctcccgctctgcctgagagtccagtttcttggagatagtcgccggcttgctctctctctctctctcccttctcatcgccagctccagctcacaatccgagcttacgtggtggaatcgctatcgccacctctcggaagattattgtactttgccttgcctacttcttgagtccgatcaaacacatccatcatgcatctgtttgtacttgcattcagccaaacacttccagtttaactccgtccgcaagtcaatacttgcattcaatttccatttcctacaaaagcagctgctcagactcttgccttctccacccagcaatcgtgtttccttccctgtatcctgcgcgtgtgttcttagctgctctaggggatccttccaatggcggagctaatggccaccatggtggtcgggccactgctgtccatggtgaaggacaaggcctccagctacctcctggagcagtacaaggtgatggagggcatggaggagcagcacgagatcctcaaacgcaagctgccagccatcctcgacgtcatcgccgacgccgaggagcaggcggctaaacacagggaaggggtgaaagcatggctcgaggcgctccggaaggtggcctaccaggccaatgacgtcttcgacgagttcaagtacgaggcactccgccgcaaggccaaggggcactacaagatgctcagcagcatggttgtaatcaagctcattcctactcacaaccgtattctgttcagttataggatgggcaacaagctcaggatgattctgaatgccattgaagttctaattgaagagatgaatgcctttaggtttaaattccgaccagagccaccaatgtcgtccatgaaatggaggaagacagattctaaaatctccgacctttctttggacattgccaacaactcaagaaaggaagataaacaggagattgtcagcagattgcttgttccagccagcgaaggggatctcactgttcttcccattgtaggaatgggggggatgggcaagaccaccttagcgcagctcatttacaatgaccctgacattcagaagcatttccagttgctgctctgggtgtgtgtttccgacaacttcgatgtggatttgctggctaaaagcatagttgaagcagctcgcaaacagaagaatgataacagtggaagtactaacaagtcaccattggatgaacttaaagaagttgtgagtgggcagaggtacctcctcgttttggatgatgtctggaaccgtgatgctcgtaagtgggaagcgctcaagtcctaccttcagcacggtggcagcggtagctcagttttgacaacaactcgtgatcaagaagtggctcaagtgatggctccagctcaaaaaccttatgatctcaagagactgaaggaaagcttcatagaggaaattatcaggacaagtgctttcagttcacaacaagaaaggcctcctgagcttctcaaaatggttggtgatattgccaagaaatgttctggttcccctttagctgcaacagcattgggctctacactgcgtacgaagaccaccaagaaagaatgggaggctatattaagcagaagcacaatttgcgatgaggaaaatggaattttaccaatactcaagctcagttacaattgcttgccatcatatatgcggcaatgcttttccttttgtgcaattttccccaaggatcatgagattgacgtggaaatgctgatccagttatggatggccaatggttttatcccagagcaacaaggagagtgccctgaaatcattggtaaaagaattttcagtgagttggtgtcaaggtcattttttcaggatgcgaaagggatcccgtttgagttccatgatataaagaactctaagattacttgtaagatccatgaccttatgcatgatgttgcacaatcctccatgggaaaagaatgcgctgctatagatacagaagttagtaaaagtgaggattttccttattctgctcgccatctatttttgtcaggtgatagaccagaagctattcggactccttccccagagaaaggatatccaggtatccaaacattaatatgttcacgtttcaaatatttgcagaatgtatcaaaatacaggtcattgcgagtattaacaacgatgtgggaaggttcattcctgataccaaaatatcatcatcacctgaggtatcttgatctctcagaaagtgaaattaaagcacttcctgaagacataagcatcctatatcatttgcaaacattgaacctttcccgttgtttatctctccgtcgacttccaaagggaatgaagtacatgaccgccctccgtcacttgtacactcacggatgttggagtttaggaagcatgcctcctgacctcggacacctcacttgcctacagacgcttacatgctttgtagccggtacttgctctggctgcagtgatttgggagagctgcggcagttggaccttggtggtcgactagagctaagaaaactggaaaatgtgacaaaagctgatgcaaaagcagcaaatctcggaaagaaggaaaaactgaccaaattgaccttaatatggactgatcaggagtacaaggaggcacagagtaataatcataaagaggtgctggaaggtctcacgcctcacgaggggctcaaggttctgagtatatatcactgtgggagcagtacatgtccaacttggatgaataaactgcgggacatggtggggcttgagttaaatggttgcaaaaatctcgagaagcttcctccgttgtggcagctaccggctctacaagttctttgcctggaaggactgggtagtttaaattgcttgttcaactgtgacacacacacacccttcacattttgcagactgaaggagctaaccttgtctgatatgacaaattttgagacatggtgggacacaaatgaggtacaaggagaagagctgatgtttcctgaggttgaaaagctgtcaatcgaaagttgccataggctaactgccttgccaaaagcatcaaatgcgatttcagaatcgtccggcgaagttagcaccgtgtgtcgttctgcatttccagcattgaaggaaatgaaattatatgatttgcgtatctttcagaaatgggaggcagtcgatggaactccaagggaggaggcaacatttcctcagcttgacaaattagaaatcagacagtgcccagagctgactactctacctgaagcaccaaagctaagtgacttagagatatctaaaggcaatcaacaaatatccctacaggcagccagcagacatattacttcattgtccagtctcgttctgcatttgtccactgatgacacagaaacagcatcggtggccaagcaacaagattcgagtgatttggtgattgaggatgagaaatggagtcataaatctcccctggaacttatggtcttgagtcggtgcaaccttttattctctcacccaagtgcactggctctgtggacatgttttgctcagctcctagatctgaaaattcggtatgttgatgcgcttgtcagctggccagaagaggtgttccagggcttagtttccttgaggaagttagagatttctgtatgcgagaatctgacaggacacacacaagctcgtgggcaatctacacccgcaccaagtgaactcctgccacgtttggagtccctagagataacgtgttgtgattctattgtggaggtccccaatctaccggcgtctctcaagctattagaaattagggggtgccccggcctggagtccatcgtattcaatcagcagcaggataggacgatgttggtgagtgcagaaagctttgcagagcaggataagtcatcgttaatatcagggtccacaagcgagaccaacgatcacgtccttccacgcctagaatctcttgtaataaattggtgcgatcgtttggaggttctccatcttcctccgtccatcaagaaattgggtatttatagctgtgaaaaacttcggtccctctcagtaaagctggatgccgttcgagaattaagtatcagacattgcgggagcttgaaatcactggaatcttgcttaggagagctcgcgtcgctgcaacaactcaaactttttgattgcaagagcctggaatccttgccgaaggggcctcaagcatactcatctcttacatctcttgaaattcgtggttgttctggtataaaggtgcttccaccgagcctacagcaacgtctggatgacatcgaggacaaagaactagatgcctgctatgaaggtaatcttcagtttcttaaccgtgtaccatttagtggtaaaagtttcgagtttcgtgtctagaacccctagtcaaccattaatatgattatatgtacatagagtacaatgcgcattcataactcacttctgcagctgtgtcatctaaaccctttaaactttgagttgcatttgggtatctaatcgcatgcaaaggaatttagttatatctcccgtagccattccttatatgtgatgatctcttcctgtgattatgcttgctagtttggactatgtaattaattttgccgggtgactatgtaattacatgacttcatttagtcgccaggtgtggcatcatgcaattattatggcaaagctgtattagtcatgatcgaagccacttggtgaacttattccctgctactttgaaccaatactcattgattatttccctttaagcgtttgatatggacgacagtttaaatttgcagagctaactaacgcagcgcttgtctttacatttctctggaaactcacagctccattgcatatgtagtttgagtatacatagtttctttgaactgtcttatgcctttgaaaagcttgactatggaattctagtctatatattcaatacatatatttttttttcttttgtttgccagaggcagaagcagaaccaaagtctcgtcatcgtcaatctgcaatcagtaggctgatgtgcttgaagtagcagtttcaggaccagatgagagttgtcatcatggtttgtaacgcgtgcttgatgattgatttcgaatgaaattctagccactatccttatgcttactctctctatggtgtgacttccttgtaggatcgttaccgaatctgcaattgttgggttattaattgtgtggttgtatctcatggtagaatgtattacctacctaccctttctcaagataaactccagtaaagtcgatcgtctggttggtgtgagctgctacaagaaggatgaagccgatgatcccaaggccttgactttaagctagtcccaggttgtaagctgaagaacaacatactggagcttaaactgcttcactctttttttatccttttccttttcttgtgaactgtgatgtgtttgatctcgttcatgctccatcataagagaatcacagctagcacttccatttcaatgatgtttttcctaacatgacatgactgcagaggatacttgtgattgatcaacaacattttgcagcaacgttctctcccgataacgctgcaatggaattgatcaattggtgttcctacttattggaatgaatttcccattgtggaataaaatggaaagattggtacaatctgctgaaaaatgaactgtcgttactcaagttgaaacatgtgtcatgtgtgtaactatcagaattgttctcgacaaaatcgttgggacttgcaaggtaaaaaaaaaaaattcctcagctctgtaaatgctattgctgaactaaagttcagaaagctatagtgccgaaagatctcagatggcctactgcaacaaaattcagtacaaatgcaaaacaatgtaacattacgtggcccagcccatcatggtaagcccatactgtatgcgctgcaaactaatattagttcaggcaattactctgaaatttctgatagacgaacctgattttttcatgtcaggtgccgtgcttgttcagattcagcaacttacatttccaaagaagaaaaaggaaattcataccttctctttatttggtttttaaaagtggcctggattttcattatttggttaaaatttggcctttgtcgtaaggatttggatcctctatccaaacacatgccttccaagataaacgaatccctcattatacaaaaaaaaaagcacaagatgctcaacaagaagcttcaaattcgtgtaaatacatgtcatgtctcgctaccaaacaatatctcaacaatgacaacagattggaggtattcatctcacaatgatacatttcaacacaaatttatgtaggcctcgctgacaggacttggctggatggctgtcagttcagttcttgaaccaactgaagcatgagcagccctgcaaggaagcgataaactgaattaaaataggaatttgttacacaatacctgtaaagtggattacattaaaatattaccaaatcatactgtaagcaatcatacagtacaagattccttgcaaacaaccctaaccaaacttctagtaaaaccattattttttctgtagtaccaactttttgcaaccactatatactccagtaaaaaccagaagtattgttgcaatgactttgccgataaattatagaacgcggctactcgaagcagtagatttaagacaatttttactgcataataactacgcatggtgtcaagatccctaaaaattaacagaggcagacccagctcaagtattgacaaactcaagtggcaactggcatatgaacaattttctcgttcaaatatatctgaagcaatgtgtaaaacaaattagttttgctccacacatctgacaataatttttttcagtaagcagacttactgtggattcatatttgcgttgttgatagcgtttgatataatctgcctcgctagtcatgacgggagcgttgccggtacc

SEQ ID NO: 385 - DNA, 3720 bp, Arabidopsis thaliana
  source 1..3720: mol_type = genomic DNA
atggattcttcatgtttcttggtttatagaatattcagatttcgtaaaagaaataagaatatttcttcttctctatcttcttcatctcccccttcttctttgtctcaaaattggttgcaccctgttttcttgagcttccgtggggaagatgtccgcaaaggcttgctcagtcacattcagaaggagtttcaaagaaacggaatcacaccgttcattgataatgagatgaagagaggaggatccattggtcctgagctcttacaggctattagaggatctaagatcgcgatcatcttgctttcgaggaactatggttcttcgaagtggtgtcttgatgaattggtggagattatgaaatgcagagaagagttgggtcaaacagtgatgaccgttttttatgatgtggatccatctgatgtgaggaagcagaagggagattttgggaaggtttttaaaaaaacttgtgttggaagaccagaggagatggtacagagatggaagcaagctttgaccagcgctgcaaatatactcggggaggattctcgcaactgggaaaacgaagcggatatgatcattaaaatctcaaaagatgtctccgatgtgttgagttttacgccatcaaaggattttgatgagtttgttggcattgaagctcatacgacggagataacttcgttgttacaacttgatctggaagaagtgagaatgatagggatttggggtcctgctggtattggcaagacgaccatctccagagttctatataacaaactctttcatcagttccaactgggcgcaatcattgacaacatcaaagtacgttatccaagaccttgtcacgatgagtacagtgcaaagctgcagttacagaaagaattgttgtctcagatgattaaccagaaagatatggtggttcctcatttaggtgttgcccaagagaggttgaaggacaagaaagttcttctagttcttgatgacgtcgatgggttagtacaacttgatgccatggcgaaagatgtacaatggtttggccttggaagtcgcattattgtcgtaactcaagatctaaaacttttaaaagctcatgggatcaagtatatttacaaagttgattttccaacttctgatgaggctcttgaaatcttctgcatgtatgcttttggtgagaagtcccctaaagttggttttgagcagattgctcggacggttacaacacttgctggtaaactcccgttaggactaagggttatgggatcatatttacggcgaatgtcgaagcaggagtgggcgaaatcaataccaaggctaaggaccagccttgacgatgatattgagagcgttttgaagttcagttacaactccttagctgaacaagagaaagatttatttcttcacataacctgttttttcagaagggaaaggattgagacattggaagtatttcttgcaaagaagtctgtagatatgaggcaagggctccaaatcttggcagataaatctctcttatctttgaacttgggaaatatagagatgcataatttgctagtacaactaggcctagacattgttcgtaagcaatctattcataagcctgggaaacgtcagttcttggttgatactgaagatatttgtgaagtactcactgatgatacgggtaccagaactcttataggcatagatcttgagttatctggtgtaatcgagggcgtaataaatattagtgaaagagcctttgaaagaatgtgcaatctccagttcttaagattccaccatccatatggtgatcgttgtcacgacatattgtacttaccgcaaggtttgagccatatatctcgaaaacttagactacttcattgggaacgttatccactgacatgtttgcctcccaagtttaatccggagttccttgtcaaaataaacatgcgagacagcatgctcgagaagctgtgggacggaaatgaacccattagaaacctcaaatggatggatttgagtttttgtgtaaacctgaaggagcttcctgatttctctactgccactaatctccaagaattgagactcataaattgtttaagcttggtggagcttccctcttccattgggaatgccactaatttactggaattggatcttattgattgctcaagtctggtgaaactcccctcctctattgggaatctcacaaatctaaaaaagttgtttctcaatagatgttcgagtttggtgaaactcccttcctcttttgggaatgtcactagtctcaaggagttaaatctcagtggttgttcaagtcttctggagatcccctcttccatcgggaatattgttaacctcaagaaagtatatgctgatggatgttcaagtctggtgcaactcccttcctctattggaaataacactaatctcaaggaattgcatctactgaattgctcgagtttgatggaatgcccttcttctatgttaaatttaactcgtctcgaagatttgaatctcagtggatgcttaagtctggtgaagctcccctctattgggaatgttattaatctccaatcattgtatctcagtgattgctcaagtctaatggaactccccttcactattgagaatgccactaatctcgatacattgtatcttgatggatgctcgaatctactggagcttccctcatctatttggaatatcactaatctccaatcattgtatctaaacggatgctcaagtctaaaggagctcccttccttggttgagaatgccattaatcttcaaagtttgtctcttatgaaatgttcaagtttggtagagctcccttcctccatctggagaatcagtaatctctcatacttagatgtcagtaactgctctagtttgctagagctcaatcttgtctcgcaccccgtggttccagattccctaatcctagatgcaggagattgtgagtctctggtgcagagactagattgcttctttcaaaatccaaagattgttctcaacttcgctaactgcttcaaactgaatcaagaagcaagagatctcatcatccagacatcggcttgtagaaatgcgatattaccaggtgaaaaagtgcctgcatacttcacgtaccgcgctactggtgattctttaacagtgaagttgaaccagaagtatcttcttcaatctttgagatttaaagcttgccttttgctagttgagggtcaaaacaaatggccaaattgggggatgaatctagtaacttctcgagaaccagatggacacattgttctgtacacaccaagcagccatcttcaaggtccacttttaatggagaatctgtatacattcgaatttgaactagtggtgacttccagtgagttcgttttggagttcagagctgatcgttacaagtgtgcggtaagcgaatgcggcctaatccaactcttttaaatccctttatgtccatgagcttcagaggtcagtggaggctgttattttgcagtctttgagatttgagacaaacactagactgaagttagggcatgacaagagctgaaatacattaatgctatatgatgaaacattttcttttaaagttgggtcgatttgacaagtttggtgtgcatgttgtgtggtgtcacttagtatgattatcattactatatatgtgatgttggtaatatgtataatttatcaattaagtcacagtatacatctatgtgtttatatgtagatattacagcgaag

SEQ ID NO: 386 - DNA, 2845 bp, Arabidopsis thaliana
  source 1..2845: mol_type = genomic DNA
caaagacttttgaatgtctcccaccaaattctgatgaatgaatatgtggatgtggtatttcatggaccagcacaaaagagcatttcaagaagtcgtttggtagctgtaccatctaattatgttcacatgatgctgagagttgaataattcagaaagggacaaagagtgttatgattgcgttgacttggagtcatgtttcatgaaggtagtgcgtagttgactcttttctagtgtaggaggtagagatttgggagagtcactagaacacgaaatggcagaggctattgtttctgttacagtgcagaagctaggacagttgctcttggaagaaccgttgttcttatttggtataggtgaccaagtgaagcagctgcaagacgaattgaagcgtttgaattgctttttgaaagatgcagatgagaagcagcatgaaagcgagagagtgcgtaactgggttgcaggcattagagaagcttcttatgatgcagaggatatcctcgaggcatttttcctcaaagcagaatcaaggaaacaaaaagggatgaaaagggtgcttaggaggcttgcttgcatcttgaacgaagcggtttcacttcatagtgttggctcagagattagagagatcacctccaggctttctaagatagcagcaagcatgctagattttggtataaaagaatctatgggcagagaaggtttgagtttgtctgatagtctaagagaacagaggcaatcgtttccatatgttgttgagcataatcttgttgggttagagcagagtctagagaagttggtgaatgatttagtttccggaggtgagaaactaagagtcacgtccatctgcggaatgggtggtttggggaaaacaactttagccaaacagattttccatcaccataaagtgaggcgtcatttcgatagatttgcttgggtatatgtttctcaagactgtagacggagacatgtttggcaagacatttttctgaatctcagctacaaggatgaaaatcagagaatactcagcttgagggatgaacaacttggagaggagttgcatcggttcttgaaaaggaataaatgcctcattgtgcttgatgatatctggggcaaagatgcttgggattgtctgaaacacgtctttccacatgaaacaggaagcgaaataatcctcactactcggaacaaggaagtcgctttatatgctgatcccaggggtgtgcttcatgagccacaattgctaacatgtgaagagagttgggagctgttggagaaaatttcattatctggaagagaaaatatagagccaatgttggtcaagaaaatggaggagattgggaagcagatagttgtaaggtgtggaggtttacctctagctataacagttcttggaggacttctggcaacgaaaagtacatggaacgagtggcaaagagtatgcgagaacatcaaatcatatgtttcaaatggaggtagtagcaatggaagtaagaacatgctagttgcagatgttttgtgcttgagttacgagtacttgcctccccatgtaaagcaatgtttcctctactttgctcattatcctgaagactatgaggttcatgtgggaacactagttagttattgcatcgcagagggaatggttatgcctgtaaaacacacagaggctggcacgacagtggaagatgtcgggcaagattatcttgaggaattagtaaagagaagcatggttatggttgggaggagggacattgtaacttcggaagtcatgacatgccgtatgcatgacctcatgagggaggtgtgtttacagaaggcaaagcaagaaagctttgtgcaagttattgattcaagggatcaagatgaagctgaggcttttatatctctttcgaccaatacatctcgtagaatttctgtccaactacatggtggagcagaggagcaccatatcaagagtctgtcgcaggtttccttcagaaagatgaaacttcttcgagttctagatcttgagggagctcaaatcgagggagggaagttgccagacgatgtaggagatctcatccatttgaggaacctgagcgtgagattgacaaacgtgaaggaacttacatcatctattggaaacttaaagttgatgattactctagacttgttcgtgaaagggcaactgtatattccaaaccaactctgggattttcctgttggaaagtgcaatccaagggatcttttagcaatgacaagtcttagaagattgtctatcaatctttcttcgcagaacacagacttcgtggtggtgtcttcactaagtaaagtcttgaaacgtctccgtggcttgacaataaacgttccatgcgaacctatgcttccaccagtagatgtaacacagttggtctctgcatttactaatctctgtgaactggaactgttccttaaactagaaaaactcccaggagaacagagtttctcctctgatcttggtgctctacgtttgtggcaatgcggattagtggatgacccgtttatggttctcgagaagcttccaaacttgaagattctccaactgtttgaaggatcatttgtaggtagtaagctttgttgttccaagaatctagagaatctagaggagtggactgtagaagacggtgccatgatgcgtcttgtcaccgtggagctaaagtgttgtaacaaactgaagtcagttcctgaaggaacgagattcctaaaaaatctacaagaagtagagattgggaacaggacaaaggcatttaaggacaagctaatctctggtggtgaagatttctacaaggttcaacatgtgccttgtgttgtttttgagaactgtgaactttaa

SEQ ID NO: 387 - DNA, 3152 bp, Arabidopsis thaliana
  source 1..3152: mol_type = genomic DNA
agcttttttgtttgtctattagagattagtcaacgtagtgatgacatactgacatctttggattgtttcaaagtttacgtttttactatacattgactagtcttagagattttatattatgcatatagtgacatagacttttcctttcttatctattcctcttctctacctaatctgtgaatctctctctctcactctctctcttttccttgattgtgcagagatgggaggttgtttctctgtttcattgccatgtgatcaagtagtgagtcagttctctcagttgttatgtgtcaggggaagttatattcacaatctctccaagaatctggcttctctgcagaaggccatgcgaatgctcaaggctcggcaatatgatgtgataagaaggttggaaacagaagagtttacagggcgtcaacaaaggctttcccaagttcaggtatggcttactagtgtcctaatcattcaaaaccagtttaatgatctgcttcgtagtaatgaagttgagcttcaaaggttgtgtctttgtggtttctgctccaaagatttgaaattgagctatcgttatgggaaaagagttatcatgatgttgaaggaagttgagagtctcagttctcaaggattctttgatgtggtttctgaggcaactccgtttgctgatgtggatgagatcccttttcaacccacaattgttggtcaggagataatgcttgaaaaggcatggaaccgtctcatggaagatggatccgggattttgggtctgtacggtatggggggagtaggcaaaacgacactactcacgaagatcaacaataagttttctaaaatagatgacagatttgatgttgtgatatgggttgttgtgtctagaagttcaacagtccgtaagatacaaagagacatagcagaaaaggtaggccttgggggaatggagtggagcgagaaaaacgataaccagatagccgttgacatccacaatgtccttaggagacgaaagtttgttttattgttggatgacatatgggagaaagtgaatttaaaagcggttggagtcccgtatccaagcaaagataacggatgcaaggtagcattcactactcgttctcgagatgtgtgtgggcgcatgggggttgatgatccgatggaagttagctgtctacaacccgaagaatcttgggatttgtttcaaatgaaggttgggaaaaatacactgggaagtcacccagacattcccggacttgctagaaaagtcgctaggaaatgtcgtggcctaccattagcactcaatgttatcggtgaagctatggcatgcaaaagaacagtacatgaatggtgtcatgccattgacgttttaacatcatctgccatagatttttcaggtatggaagatgaaattctccatgttttgaagtatagctatgataatttaaatggggagctgatgaaatcctgcttcctctattgctctctgtttcctgaagactatcttattgataaagaggggttggtagactactggataagtgagggattcataaatgaaaaagaaggcagagagaggaatattaaccaaggttatgagataattggtacccttgtccgtgcatgtttgttgttggaggaagaaaggaacaaatcaaacgtgaaaatgcatgatgtggttcgtgagatggctctatggatatcatccgatcttgggaagcaaaaggagaaatgtattgtgcgagctggtgttgggttacgtgaagtaccaaaagtcaaggattggaacactgtgagaaagatttctttgatgaataatgagattgaagagatatttgacagtcacgagtgtgctgcacttacaactctatttctccaaaagaacgacgtggtaaagatctcggctgaattctttcgatgtatgcctcatctggtggttttagatctatcagagaatcagagtcttaatgaattaccagaagaaatatcagagctggcctctttgagatatttcaacttgtcatatacatgtatacatcaactacccgttggtttatggacattgaaaaagctaatacatctgaatctcgaacacatgagcagtcttgggagtatattagggatatcaaatttgtggaatttgaggacattgggactacgagattccagactgttgctagatatgagtttagtgaaggagctgcagctcttagaacatctagaagttataaccctagatatatcatcaagtttggttgcagagccattgttatgctctcaaaggttggtggaatgtataaaagaggtagattttaagtaccttaaggaagaatcagtgagagtattgactttgccaaccatgggtaatctccgcaagctcgggataaaaagatgtggaatgagggagataaagatagagaggacaacttcatcatcgtctcggaacaaaagtcccacaactccatgcttctcaaacctctccagagtctttatagctaaatgccatggtcttaaggatttgacgtggcttttgtttgctcctaatcttacttttcttgaagttgggttctcaaaggaagtagaggatataattagtgaagagaaagctgaggagcattcagctacgattgttccttttaggaaattggagacactacacctgtttgaattacgcgggctcaagagaatctatgcaaaggctctgcattttccgtgtctgaaagttatccacgtagaaaaatgtgaaaagctgagaaagcttccattggattctaaaagtgggatcgcgggtgaagaacttgtcatatattatggagagagagaatggatagaaagggttgaatgggaggaccaagcaactcaactccgtttcttaccttcatccaggtggcggtggagagaaacataatgaacttcactttcttctacaaacttttgttgtcatggtctaaagacatttgccggtgtgtaaatctcttccttgtctcttcttgtttgcataaccgttctcatcgttcttttggttagtgatcattggatttgtacttatctctttctctaaacgatgagtgtttgtttcggcttcatagaaacattacacagagactcatgagaaaatgaataaaaacttgcaagttcctaaccattgtaataaaataataattaac

SEQ ID NO: 388 - DNA, 1159 bp, Arabidopsis thaliana
  source 1..1159: mol_type = genomic DNA
gtttggtttaggcatctgaaatctaccgaaatgggccggtaattagctcatacccaacacgaccagaccagaccgacccgacccgacggctccagattcatccatgtttcatcttcctcatcagatctaattcaatctgcgaatttctcttaaaccctaaccctctcgctgccgtccggtggtttttccgacgacgaactatgacgattcacgctgcagtaatccagaagcttctgaacaccggagcacatctcggccgtcgtgccgccgagcaccatttcaagcaatacgcttacgggacgcgtaacggaatgacaattatcgactccgacaaaaccctaatttgcctccgtagcgccgctcatttcgtcgctaacctcgcccacatgagaggtaacatcttcttcgtcaacacgaatcctctcttcgacgaaatcattgagctcacttctcgtcggatccaaggagattcgtataatcacaaccgtgcgatgaatctgtggaagatgggagggtttttgactaacagctacagtcctaagaagtttcgatctaggcataaaaagctttgctttggtccaactactatgcctgattgtgtcgttgtgtttgattctgagaggaagagctctgtgatacttgaggcatcgaagcttcagattccggttgttgcaattgtggacccgaatgtgccattggagttctttgagaagattacgtatcctgtgccagctcgtgattcggtcaagtttgtgtatttgttctgtaatgtgatcaccaagtgctttgtggcagaacagatgaagttggggatcaaagaagggagcaatgaagatttgatgaaggatttagctgcttgattttgatatttgcaacaaaagtatgaaactttacagttgtttttctgagtctggaataattgttcttcagaattgtggttacttcaactttgaaattctgggagttttttacacatggatgattttgtttctctgatggatatttctgtataagattgttgagttctagtgttctacatcttgataactgccttgtcttttccttgcacaactcattttttggaaatgctttagacattgtatatggtaatcgttacttcacaagttttggaatgagctatttacaagtaactgtctgg

SEQ ID NO: 389 - DNA, 3126 bp, Arabidopsis thaliana
  source 1..3126: mol_type = genomic DNA
caatgataagattctaaagtagattgagacaagtttcgtagtcggcagcagtaaccaagaaaacgagtaaggttgactcttgacttgttaaaccattgacttcaatttcgataaagtctctatgtaagctcatttttctgaaacaagttttgctaaaaaaatccaaagatctgaagcttcagatccttctcggctaaggctaagtcacaaccttgtaagtttactttactttggttagatttgtttcaatgttctaggattctacatgtttcttgagaagatatggattagttaaagaataatccaatcttttggttattgagattctatagtcgttggttgattgatttttggaaagttcaatctagtgatgatacacataaccgattgaattattgcttggttatagtttaccaattagagatatttcttgaagttgcagggtctgagtaaatggtggacgctgttgtaacagtgtttttagagaaaaccttgaacatcctcgaagaaaaaggccgaaccgtatcggactaccgaaaacagttggaagatttgcaaagcgaattgaaatatatgcagtcttttctcaaggatgcagagaggcagaagagaactaatgaaacgttgcgtactcttgttgcggatttacgagaactggtttacgaagctgaggatatacttgtggattgtcagctcgcggatggtgatgatgggaacgagcaaaggtcatcaaatgcgtggctttcgcggcttcatcctgcccgggttccgttgcagtacaagaaaagcaaacgtttgcaagagatcaatgagaggataacgaaaataaagagtcaagtagagccttatttcgaattcataacgccgagtaatgttggaagagataatggaactgatcggtggagctctccggtgtatgatcatactcaggtggttggtttggaaggagataaaagaaaaatcaaggagtggctctttcgatcaaacgacagccagcttttgataatggcctttgttgggatgggagggctaggtaaaactacaatcgctcaagaagtgttcaatgacaaagagatcgaacatcgtttcgaaagaaggatatgggtgtctgtgtcccagacttttactgaagaacagatcatgagaagcatattgaggaacttgggggacgcgagtgttggagatgatattggaacattgctgagaaaaatccagcagtatcttttggggaaaaggtacttgatagttatggacgatgtatgggacaagaatttgagctggtgggacaagatctaccaaggactgcctagaggacaaggaggtagcgttatcgtgaccacaaggtcggaatctgtagcgaaaagggtgcaagcgagagacgacaagactcaccgtccagagctccttagtcctgataacagttggctgctgttttgtaatgtggcatttgcagcaaatgacggtacttgtgagcgtcccgagctagaggatgttggcaaggagattgtaacgaaatgcaaaggtttgcctttgacaatcaaagcggttggtgggttacttctgtgcaaagaccatgtctatcatgaatggagacgaattgcagagcattttcaggatgagctaagaggaaacacttctgaaactgacaatgttatgtcttctctgcagttgagctacgatgaactcccttcccaccttaagtcgtgcattctcacgctttcgctctatccagaagactgtgttataccaaaacaacaactagtacatggatggatcggagaaggttttgtcatgtggagaaacggaagatctgcaactgaatctggagaagactgcttttccgggctcacaaacaggtgtctaatagaagttgtagacaaaacctatagcggaaccatcatcacttgcaagattcatgacatggttcgtgatttggtgatcgatatagccaagaaggattcgttctctaacccggaaggcctcaactgtcgtcaccttgggattagtggaaactttgatgagaagcagatcaaagttaaccataagctgagaggcgtagtgtcaacaactaagacaggtgaagtgaacaagctcaactcagacttagctaagaaattcacagactgcaaatatcttcgggttctcgatatctcgaaatccatatttgatgctcctctgtctgagattttggatgagattgcaagccttcaacacttagcatgtcttagtttgagcaacacacatccgttgatccagtttcctcgttccatggaagatctccacaaccttcagattctagacgcaagctactgtcagaatctgaaacaacttcaaccttgcatcgtcttgttcaagaaactccttgtacttgacatgacgaactgtggatcccttgaatgcttccccaagggtatcggaagtctcgtgaagctcgaagttctgttgggatttaagccagccaggtccaacaatgggtgcaagctcagtgaagtgaaaaatctcacaaaccttcggaaacttggtctttctctgactcgtggcgatcagatagaagaggaggagcttgattctttgataaacctaagcaagctgatgtccatttcgatcaactgctatgatagctacggcgatgatctcataaccaaaatagacgcccttactcctccacaccagctccatgagctttctctacaattctatcctggaaagtcgagtccatcgtggttgagtcctcacaagcttccgatgttgaggtacatgtcaatatgttcaggtaatttggtgaaaatgcaggaaccattctggggaaacgagaatactcactggagaattgaaggtttaatgttaagttcattgtcggacctagacatggactgggaagtgctgcaacagtcaatgccgtacctgaggaccgtgaccgcaaactggtgtccagagctagagtctttcgcgattgaagatgttggctttagaggcggagtgtggatgaaaacaccattgcacagaacctgatgaaacgttttaagcaactagatcaatgtttattaaacagtgacaataagttggtgtattacatataccttgatacaatgtaatgttgctttgaccgtttggatttcatatcgc

SEQ ID NO: 390 - DNA, 1170 bp, Arabidopsis thaliana
  source 1..1170: mol_type = genomic DNA
gaaaacggcccatataaatccaccaaacgaatcttctctcttggtataaatatgctgtcttgcgttacagagaaaccctagacgtcgaagatgaagttcaacgttgcgaatccaactactggatgccagaagaagctcgagatcgacgatgaccagaaactacgtgcgttttacgacaagagaatctctcaagaagtcagtggagatgctttgggcgaggagttcaaaggatacgttttcaagatcaagggtggttgcgataagcaaggtttcccaatgaagcagggagttttgactccaggccgtgttcgccttttgcttcaccgaggaactccttgcttcagaggacatggaaggagaactggtgagaggagaagaaagtctgttcgtggttgcattgtgagccctgatctctctgttctgaaccttgtcattgtgaagaagggtgagaacgatcttcctgggcttaccgatactgagaagccaagaatgagaggaccaaagagagcctccaagatccgtaaactgtttaacctcaagaaggaagatgatgtcaggacctatgtcaacacttaccgccgcaagttcacaaacaagaagggcaaggaagttagcaaagcccctaagatccagaggcttgtgaccccattgactcttcagaggaagagagctagaattgctgacaagaagaagaaaattgctaaggctaattctgatgctgctgattaccagaagcttctcgcctcgaggttgaaggaacagcgtgacaggaggagtgagagtttggcaaagaagaggtcgagactctcttctgctgctgccaagccctctgtcacagcttaaaaaagcttgagaatcaaatcaaagatgtcacctttctagttttgttctcttttcttctccggctattaaaaagttagttcgagttcatattcagctgtttttgttccaagacatgggtacacaatcgctttgggcttgtttcatgatttatgcttttagttgaagaccattttaaactcaatttttattgcttatctttctcagtttttgatcaaagcgtttctccattgaaaaccattttaatcacctgtttcaatcatacataatgttaaacacatgtactggcgattacaataggtatatattttgactgaaatttatggagca

SEQ ID NO: 391 - DNA, 3147 bp, Arabidopsis thaliana
  source 1..3147: mol_type = genomic DNA
aatggagttgccatggaggttgaggtaatttgtagctcgaatgcatctgatcatgcagttagtatagataatctgtggatattttgcaatattcgtagggaaaaggaaccaaaaatccatcaagttgtaagtgtttagcaaatatctacaagacttcatcttttgtgctttctcttaaatgtatccgatttttttttgcatttgaaagttctacaatattattagagtagtgggaaatgtcataatcgtggaaaagtataaatattttcaataatgcatacagtaatcattgattccctttgtgtggttgaaattctattctatacatctttaaattcgatatagtaatcatttattccctatctcttcttttcatcattttgaataattgtcactcactcaatttggtttcttgttttgctctctagatctctcttttctctcttctttccatctccagcaatgggagcttgtttaacactctcgttctcttgtgatgaagttgtgaatcaaatctctcaaggtttatgcatcaacgtgggttatatttgcgagctctccaagaatgtagtggctatgaagaaagacatggaagtgctgaagaaaaagcgagatgatgtgaaaagaagggtagatatagaagagttcacaaggcgtcgtgaaaggctttctcaagtccaaggatggcttacgaatgtctcgaccgtcgagaataaattcaatgaactgcttaccactaatgacgctgagcttcaaaggttgtgtctctttggattttgctctaaaaatgtgaaaatgagctatctttatgggaaaagggttgtcctgatgttgaaggagattgagagtcttagttctcaaggagattttgatactgtgactttagccactccaatagctaggattgaagagatgcctattcaacctacaatcgtaggtcaggaaacaatgctcgaaagggtatggacccgtctcacagaagacggagacgagattgtgggtctttatggcatgggtggagtaggcaaaaccacccttctcacacgaatcaacaacaagttttctgaaaaatgtagcgggtttggggttgtgatatgggtggtggtgtctaagagtccagatatccataggattcaaggagacatcgggaagagactagaccttggaggcgaagagtgggataatgtaaatgaaaaccagagagcccttgacatatacaatgtccttgggaaacaaaaatttgtgttgttgttggatgatatatgggagaaagtgaatttagaagtgcttggagtcccttatccaagcagacaaaatggatgcaaagtagtattcaccactcgttctagagatgtttgtgggcgtatgcgggttgatgacccgatggaagtcagttgcctagaacccaacgaagcctgggaattgttccaaatgaaagttggagaaaacacattgaaaggccatccagacattcctgaacttgcaagaaaagttgctggaaaatgttgtggcctaccattggcacttaatgtcattggcgagaccatggcatgcaaaaggatggtacaagaatggcgtaacgcaattgacgttttgagctcatatgctgcagaattccctggtatggaacaaattcttcctattctaaagtatagctatgataatttaaacaaggagcaggtgaaaccatgtttcctatattgctctctgtttcctgaagattatcgtatggaaaaagagaggttgatagactattggatatgtgagggattcatagatgaaaatgaaagtagagaaagagcattaagccaaggttatgagatcattggtatccttgtccgagcatgtttgttgttggaggaagctatcaataaagaacaagttaaaatgcatgatgtggttcgggagatggctctatggattgcatctgatcttggggaacataaagaaagatgtattgtgcaagtcggtgttggattacgtgaggtaccgaaagtcaagaactggagttctgtgagaaggatgtcgctgatggaaaatgagattgaaattttatctggcagtcccgaatgcctggaacttacaactctgttccttcagaaaaatgattcattgctacatatctcggatgaattcttccggtgtatcccaatgctagttgttttggatctatcagggaattcaagtctccggaaattgcctaaccaaatatcaaagttagtctccttgcgttatcttgacttgtcgtggacatacattaagcggctacctgtcggtctacaagagttgaaaaagctcagatatttgagattggattacatgaagagacttaagagtatttcagggatatcaaatatatcaagtttgaggaaattgcaacttttacagtctaaaatgtcgctagacatgagcttagtggaggagttgcagctattagaacatttagaagttctaaacataagtatcaagtcaagcttggtagtggagaagttgttaaatgctcccaggttggtgaaatgtcttcaaatcttagtacttagaggagttcaggaagaatcatccggagtattgactttgccagatatggataatctcaataaagtcatcataaggaagtgtggaatgtgtgagataaagatagagaggaaaactttatcattatcatcgaacagaagtcccaaaactcaattcctccataacctctccactgtgcatataagtagctgtgatggtctgaaggatttgacgtggttgttgttcgctcctaacctcactagtctcgaggttctggactcggaactagtagaaggaataataaaccaagagaaagctatgactatgagtggtatcattcctttccagaaactagagagtctacgcctacacaatctagcgatgttgaggagcatctactggcaacctctgtcttttccatgtctgaagacaattcacataacgaagtgtcctgagctgagaaagcttccattggattctgaaattgccataagggatgaagaacttgtcattaagtaccaagaggaagaatggcttgaaagggttgaatgggacaacgaagccacaagactccgtttcttaccttttttcaagttctttggacctgaatggcaagttagttatgtgcggtag

SEQ ID NO: 392 - DNA, 3034 bp, Arabidopsis thaliana
  source 1..3034: mol_type = genomic DNA
caaaaaaacaaagaaggattataagctatacttacttttcagcttctctcatggaagaatcttcatctttgtcattgcagtcttgcaattggagacaccatgtgtttccaagcttcagcggcaaagatgtccgcagaacctttctcagccaccttctcaaggagttccggcgtaagggaatccgtactttcatagataatgatatcaagagaagccaaatgatcagttctgagcttgtacgagctatcagagaatctaggattgcggttgtagtgttgtcgcggacctatgcatcttcaagctggtgtttgaatgagttggtggagataaagaaagtaagccagatgatcatgccggttttctacgaggtggatccatctgatgtgaggaaacgaacgggagaatttggaaaggcgtttgaggaagcatgtgaaagacaaccagatgaggaagtgaagcagaaatggagagaagcattggtctatatagctaatatagccggcgagtcttctcaaaactgggacaatgaagcagatctgattgacaagattgctatgagcatttcatatgaattgaattctacattatcacgagattcctacaatctggttggaatcgacaatcatatgagagagctggattctttgttatgtctggaatcaactgaagtgaaaatggtggggatttggggtcctgcaggtattggcaagacaacaattgccagagctttattcaaccggctatctgaaaacttccaacacactatttttatggagaatgttaagggaagttctaggacctcggagctcgatgcctatggcttccagttgcgtttgcaagaacagtttctgtctgaagttattgatcataagcatatgaagatacatgatttaggtttggtaaaagaaagattgcaggatctgaaagttcttgttgttcttgatgatgttgataaactagaacaacttgatgccttagtgaaacaatctcagtggtttggttctggaagtaggatcattgtgaccacggaaaacaaacagctattgagagcgcatgggatcacttgcatatatgagttgggttttccatctagaagtgattctcttcagattttctgccaatatgcatttggagagagttctgcaccagatggttgtatcgagcttgctactgaaataacaaagcttgctggctatcttcccctagctctaaaggttttggggtcctctctgcgagggatgagcaaagatgagcaaaaatcagcattgcctcgactcagaaccagtcttaatgaggatattagaaatgttttacgagtcggttatgatggtatacatgacaaggataaggtcatattccttcatattgcttgtttattcaatggtgagaacgttgattatgtgaagcaaatacttgcaagttctggcttggatgtcacatttgggcttcaagtccttaccagtaggtctctcatacacatatcgagatgcaatcgtactattacgatgcacaatttgctagaacaattgggtcgagaaattgtttgcgaacaatctattgccgagcctggcaaacgtcaattcttgatggatgcttcagagatttatgatgtacttgctgataacactggtactggagctgttttgggcatatctttggacatatctaagatcaatgagttgtttctgaatgaaagagcttttggtgggatgcataatctgttgtttctaagattctacaagtcctcttcgagtaaagatcaacctgagcttcatttacctcgaggcttggattatttaccccgtaaacttaggctgctgcattgggatgcattccccatgacatcaatgcctctgagtttttgtccacagtttcttgttgtgataaacataagggagagccagcttgagaagctgtgggaaggaacacaacctcttagaagtctaaagcagatggatttaagtaagtctgagaatctaaaagagattcctgatctttcgaaagcggtaaatatcgaggaactctgtctcagttattgtggaagtttggtgatgttaccttcctcgatcaagaacctcaacaaattggttgttcttgacatgaagtattgctcaaagctagagattatcccctgcaatatggacttagagtcccttagcatcctcaatcttgatggatgctcacgattggagagttttccagaaatttcttcgaagattggatttctctctctgtcagaaactgcaatagaagaaattcccacaacagtcgcgtcttggccatgtctggcagcattggacatgtcaggctgcaagaacctcaagacgtttccatgtcttccaaaaactatagaatggttggatttgagcaggacagagatcgaagaagttcctttgtggatcgataaactctcaaagctcaataaactattgatgaacagctgcatgaagctaagaagcatctcttctgggatctctacgctggaacatatcaaaacactagattttttggggtgcaagaatattgtgagctttcctgtagagatattcgagagctctcggttctgtcataatctggtgatggagatgagaaacattcaaaaccctgatcttcctcgaccattttatttcaagaacaactatattgacactattccagattgtattacacgtcactgcaagctgccttttctgaattcatcaggatcaatctccagcaagatagagaatgatttcatctggttcgataaataaatatcagtgaagaattgcatgataatgatgagtcagatggagtttcatcttcaaaccctgctcattacaattgtaagtgacatcatttgacttttcccctgtggacccatctttgggcactgcaagtgttccagaccatatagttcaacatctctgaaactgagaatgaaatccgtgtacgttgggcacgttattattgttgaaatgtaggttcttgtaagatatagcttatagacaattgtttgtatatccgtgtacgttgggcacgttattattgttga

SEQ ID NO: 393 - DNA, 3099 bp, Capsicum chacoense
  source 1..3099: mol_type = genomic DNA
caaatatttcttggagtgaatttgaagttgtattatctgcaattgaatggttggtcatagtcgcaaaggacaaaaacgagaatacagtatatatggctcatgcaagtgtggcttctcttatgagaacaatagaatctctcttgacattcaattcgccgatgcaatctctatcctgtgatcacagagaagaactttgcgctcttcgtgaaaaagttagttccctggaagtatttgtcaagaactttgagaaaaacaatgtttttggggaaatgacggattttgaagtagaggtaagagaagttgcaagtgctgctgaatacacaattcaactgagactaacaggaactgtactgggagaaaataaaagccagaaaaaaaaggcgcgtcgaaggtttcgtcaaagcctgcaacaagtagcagaggacatggatcatatctggaaagagtcgacaaagatccaagataaaggaaaacaagtatcaaaggaatcattggttcatgatttttcaagttcaacaaacgatattttgaaggttaagaacaatatggttggacgtgatgatcaaaggaaacagttgttagaagatctgactagaagctactctggggaacccaaagtcatcccgattgtcgggatgggaggcataggtaaaacaaccttagcaaaagaagtttacaatgatgaatcaattctatgccgttttgatgttcatgcctgggctaccatatctcaacagcacaacaaaaaggaaattttgctgggccttctgcattccacaatcaaaatggatgacagggttaagatgattggtgaagcagagctagcagacatgttacagaaaagtttaaagagaaagaggtacttaattgtcttggatgatatctggagttgtgaagtgtgggatggcgtgagacgatgctttccaactgaagacaatgcagggagtcgaatactgttgactacccgtaatgatgaagtagcttgttatgctggtgtagagaatttttctttgcggatgagcttcatggatcaagatgagagttggagtcttttcaaaagtgcagcattttcaagtgaagcattaccatatgagttcgagactgttggaaagcaaatcgcagatgaatgtcacgggttaccactaactattgtcgtggttgcagggcttctcaaatctaaaaggacaatagaagattggaaaactgttgctaaagatgtcaagtcattcgtcacaaatgatcctgatgaacgatgttcacgtgtgcttgggttgagttacgatcacttgacaagcgatctaaaaacatgtcttctgcatttcggaatttttccagaagacagtgatattccagtgaagaatttgatgagatcatggatggctgaggggttcctgaagttggaaaatgatttggaaggagaggttgagaagtgtttgcaagagcttgtcgatagatgtctagtcctcgtcagcaagagaagtcgagatggaacaaaaattagatcatgtaaggttcatgatctaatatatgacctgtgcgtgagagaagttcaaagggagaacatttttatcatgaacgacattgttcttgacgtatcatatccagaatgttcatatctctgtatgtataaaatgcagccctttaagcgcgtgactggtgatgaaattaattattgtccctatggtctttatagggctcttcttacccctgtaaatcgtcagttgagagatcatgacaacaacaatcttttgaaacgaacccattctgttttctcttttcatcttgagcctttatattatgttctcaaatcagaggttgttcatttcaaattactcaaagtcttggagctgagacacagacagattgatggtttccctcgagagatactaagcctcatctggttgaggtacctatcattgttcagctatgggaatttcgatgtacctccagaaatttgcaggttatggaatctgcagacattcattgttcaacggtttcgatcagatataataatttttgctgaggaaatttgggaactaatgcaattaaggcatcttaaactgcccagattttatttgccagattgcccaagtggatctgttgacaaaggaaggcacttggatttttcaaacttacaaactatttcttacttgtctccacgttgttgcacgaaggaggttattatggggattcagaatgtcaaaaaattaggaatcagtggaaataaggatgactataaaagttttcgggactctgggcttcccaacaatcttgtctatctgcagcaacttgaaatattgagtcttatatctgttgattatagccttttgccagtgatcatttcaagtgcaaaagcttttccagcaacgctcaagaagttgaagttggaaagaacttatctaagctggtcatacttggacatcatagctgagttgcctaaccttgaggtgctgaagctgatggatgacgcttgttgtggtgaagaatggcatccaattgttatgggatttaatcgattgaagcttttgctaattaaatatagttttctcaagttctggaaagccacaaatgacaattttcctgtccttgagcgcctcatgattagaagttgcaaaaatttgaaagagatacccattgagtttgcagatatacacacactacagctgattgagttaagagagtgtcctcccaaacttggggaatctgctgcacgaattcagaaagaacaagaagacctcggaaacaaccctgtggatgttcgtatctcaaatccattgaaggagagtgattctgattcagaagaacattaggaaaggatctcaaggccagaaggattgaactcttgggatttcatttcggccctctatcacaaaataccactaaattatcggtttcaagcaatgtgtgacttccaaggagatgtgatatcttttgtgttgtaacatatttttgagttgtactgattcccttcttcccttctctttttatgtaactttactaattcaacttcaagtactagcagaccacatggttgattgtgatcgagtttgatgattattttatacgatgagacaaccagtttagttttaaaaaaaaaaa

SEQ ID NO: 394 - DNA, 4010 bp, Glycine max
  source 1..4010: mol_type = genomic DNA
aatacagctgttaaagtttgtcttgttgggaacactcaacagttattggttgactcaatcttaattaaagccatccttcataaaattgcctatcactgatttgatcagttcatgaaccctgcactgcacttcaaattactcattttcattcatccactcaactccctttcctaccatggcactagaattggttggtggtgctcttctttctgctttccttcaggttgcgtttgagaagcttgcttctcctcaagttctggacttctttcgtggaagaaagcttgatcaaaagctgctcaacaacttggaaatcaagctgaactccatacaggctctggctaatgatgcagaactaaagcagttcagagatccacttgtcagaaactggcttcttaaggtcaaagatgctgtgtttgacgcagaggatatcttggatgaaatacaacatgagatctccaaatgccaggtcgaagctgaagctgaagctgagtctcaaacctgcacttgcaaggtaccaaatttcttcaaatcttctcctgctagttcctttaacagggaaattaaatccaggatggaagaaatccttgatagattagatcttctctcaagccaaaaggatgatctaggcttgaaaaattctagtggtgttggcgttggatcagaattgggtagtgcagtaccacagatatcacaatcaacatcttcagttgttgaaagtgatatttatggcagagataaagacaaaaaaatgatttttgattggctgacatctgacaatggcaatcctaaccagccatcgatactttctattgtgggcatgggtgggatgggtaagaccacacttgctcaacatgtattcaatgaccctaggatcgaggaggctagatttgatgtcaaagcttgggtctgtgtttcagatgattttgatgctttcagggtaacaagaacaattcttgaggccatcactaaatcgactgatgatagtagagacctagagatggttcacggaagattgaaagaaaaattgacggggaagagatttcttcttgttttggatgacgtttggaacgaaaaccgacttaaatgggaagctgtgctaaaacatcttggttttggggctcaggggagtagaattattgccaccacacgtagtaaggaagttgcttctaccatgaggtcaaaagaacacctcctggagcaattacaagaagatcattgctggaagttgtttgctaaacatgcattccaagatgataatattcaaccaaatccagattgcaaggagattggtatgaagatagttgaaaaatgtaaaggacttcctctggccttgaaaacaatgggaagtctattacacaacaagtcatctgttacggaatggaaaagcatattgcagagcgagatatgggaattttcaacagagcgtagtgatattgtacctgctttagcactaagctatcaccatcttccttctcatctcaagagatgttttgcttattgtgccttattccccaaagattatgagtttgataaggagtgcttaatacaattgtggatggctgaaaaatttctacaatgttctcaacagggtaagagtccaggagaagttggtgaacaatacttcaatgatctattatcaaggtgcttctttcaacaatcaagcaacacagagagaacagattttgtcatgcatgaccttctcaacgatttggcaagatttatttgtggggacatttgtttcagattggatgggaatcaaacaaaaggtacaccaaaagcaacccgtcattttttaattgacgttaaatgttttgatgggtttggaactctatgtgacacaaaaaagttacgtacttatatgccaacaagttacaaatattgggattgcgagatgtcaatacacgaattgttctccaagtttaattacttacgtgtcttatctctgtttgattgtcatgacctaagagaggtgcctgactctgtgggtaatctcaaatatctccgttcgttagacttatccaatactaaaatagaaaaactacctgaatcaatatgttcactctacaacttgcaaatactgaagctaaatggttgtagacatttgaaggagctgccctcaaatttgcataaactcactgatttgcatcggcttgaattaatagaaactggagtgagaaaggtaccagcacatttgggaaaactggagtatcttcaagtattaatgagttcgtttaatgttggcaaaagtagggagttcagtatccagcagttaggagaactcaatcttcatggaagtctatcaataaggcaactgcagaatgttgagaatccatcagatgcattagcggtggatttaaaaaataaaacacaccttgtcgaggtagagttagaatgggattcagactggaaccctgatgattcaacaaaagaaagggatgtaatcgagaatctacagccttccaaacacttggagaagttgaggatgaggaactatgggggtactcaatttccaaggtggttattcaacaattcatcatgtagtgtggtgtccttaaccttgaagaactgtaaatattgcctatgtttgcctccccttggacttttgccatctctgaaggaactttcaattaaagggcttgatgggatcgtgagtatcaatgctgattttttcgggagtagctcttgttcatttacatccttgaaatctttggagttctaccatatgaaggaatgggaagaatgggaatgtaaaggtgtgacaggtgcttttccacgtcttcaacgtctttctatagagcgttgtcccaagctgaaagggcacttgccagagcaactatgtcatttaaattctctaaagatttctgggtgtgaacaacttgtaccttctgctctcagtgcccctgatattcataaattatacctaggagactgtggagagctgcaaattgatcatgggacaactttgaaagagcttaccattgaaggtcacaacgtggaggcagccttattcgaagagattgggcgcaattactcttgttcaaataacaatattcccatgcacagttgctatgatttccttgtaagcttgcgcatcaaaggtggctgcgactctttaacgacctttccgctagatatgttcacaatactcagggaactttgtatctggaagtgtcctaatctacggaggatttcacaagggcaggctcataatcatctccagactctggatatcaaagagtgcccccaattagaatcattgcctgaaggaatgcatgtcctccttccatctcttgattctctgtgcatagatgattgtccaaaagttgaaatgtttcccgaaggaggtttgccatcaaatttaaaagaaatgggtctctttggtggtagttacaaacttatctccttattgaaaagtgccttgggaggcaatcactctctagaacggttagttattggaaaagtggattttgagtgtcttcctgaggaaggtgtactgccacactctcttgtttctctacagatcaatagctgtggagatcttaaaagactggactacaaaggtatctgccacctctcctctctcaaggaattgagtcttgaagactgccccaggctccaatgcttaccagaggagggtctgcccaaatccatttcaactttgtggatttggggggactgtcagttgctcaaacaacgttgccgggaacccgaaggcgaagactggccaaagattgctcacttttgcccgttgctcaatcaacgttgccgggaacccggaggcgaagactggccaaagattgctgacattgaaaacgtgtatataaggtagtgaggttgattataaagaataatggtgaaagatgtagatgcttctctattgcctgcaatttactaaataattgttttctaaacttatttttgctttctgcttgctggacgccgccgctcagttatttattattcgacaaaataattgtttaatatagtttcaagtgattgattctgcttgg

SEQ ID NO: 395 - DNA, 3639 bp, Glycine max
  source 1..3639: mol_type = genomic DNA
atggcagtagaattaattgctggtgctcttctttcttctttccttcaggttgcattcgaaaagcttgcttctcctcaagttctccacttctttcacggaaaaaaacttgatgagacgcttctgagaaagttgaaaattaagctgctgtccatcgatgctctggctgatgatgctgaacgaaagcagttcgcagatccacgcgtgagaaactggcttcttgaggtcaaagatatggtttttgatgcagaggatctcttggatgaaatgcaatatgaattctccaaatgggaactggaagctgaatctgaatctcagacctgtaccggctgtacttgcaaggtaccaaatttcttcaaatcttctcctgctagttcctttaacagggaaattaaatccaggatggaaaaaatccttgatagcttagaatttctctcaagccaaaaggatgatctaggattgaaaaatgctagtggtgttggcgttggatcagaattgggtagtgcagtaccacagatatcacaatcaacatcttcggtggttgaaagtgatatttatggcagagataaagacaaaaaaatgatttttgattggctgacatctgacaatggcaatcctaaccagccatcgatactttctattgtgggcatgggtgggatgggtaagaccacacttgctcaacatgtattcaatgaccctaggatccaggaggctagatttgatgtcaaagcttgggtctgtgtttcagatgattttgatgctttcagggtaacaagaacaattcttgaggccatcactaaatcgactgatgatagtagagacctagagatggttcacggaagattgaaagaaaaattgacggggaagagatttcttcttgttttggataacgtttggaacgaaaaccgacttaaatgggaagctgtgctaaaacatcttgtttttggggctcaggggagtagaattattgccaccacacgtagtaaggaagttgcttctaccatgaggtcaagagaacacctcctggagcaattacaagaagatcattgctggaagttgtttgctaaacatgcattccaagatgataatattcaaccaaatccagattgcaaggagattggtacgaagatagttgaaaaatgtaaaggacttcctctggccttgaaaacaatgggaagtctattacacgacaagtcatctgttacggaatggaaaagcatattgcagagcgagatatgggaattttcaacagagcgtagtgatattgtacctgctttagcactaagctatcaccatcttccttctcatctcaagagatgttttgcttattgtgccttattccccaaagattatgtgtttgataaggagtgcttaatacaattgtggatggctgaaaaatttctacaatgttctcaacagggtaagagtccagaagaagttggtgaacaatacttcaatgatctattatcaaggtgcttctttcaacaatcaagcaacacaaagagaacacattttgtcatgcatgaccttctcaacgatttggcaagatttatttgtggggacatttgtttcagattggatggtgatcaaacaaaaggtacaccaaaagcaccccgtcacttttcagttgcaatcgaacacgttcgatactttgatgggtttggaactctatgtgatgcaaaaaagttacgttcatatatgccaacaagtaacaaaaagatttttgattacttctcttcttgggatcgcaatatgtcgatacatgaactggtctccaagtttaagttcttacgtgtcttatctttatctcattgttctaacctaagcgaggtgcctgactctgtgggtaatcttaaatatctcagttcgttagacttatccaatactgaaatagtaaaactacctgaatcaatatgttcactctacaacttgcaaatactgaagctgaattattgtaaacaattggacgagctgccctcaaatttgcataaactcactgatttgcatcgccttgaattaatagatactggagtgagaaaggtaccagcacatttgggaaaactgaagtatcttcaggtatcaatgagtccgtttaaggttggcaaaagtagggagttcagtatccagcagctaggagaactcaatcttcatggaagtctatcaattcagaacctgcagaatgtcgagagtccctcggatgcattagcagtggatttgaaaaataaaacacaccttctggaggtagagttagaatgggattcagactggaaccctgatgattcaacaaaagaaagggatgaaattgtaatcgagaatctacagcctcccaaacacttggagaagttgaggatgaggaactatgggggtaaacaatttccaaggtggttattaaacaattcattattgaatgtggtgtccttaaccttggagaactgtcaatcttgccaacgtttgcctccccttggacttttgccatttctgaaggagctctcaattcaagggcttgcagggattgtgagtattaatgctgattttttcgggagtagctcttgttcatttacgtccttggaatctttgatgttccacagtatgaaggaatgggaagaatgggaatgtaaaggtgtgacaggtgcttttccacgtcttcaacgtctttctatagagtattgtcccaagctgaaggggcacttgccagagcaactatgtcatttaaatgatctaaagatttatgggtgcgaacaacttgtaccttctgctctcagtgcccctgatattcatcaattatccctaggagactgtggaaagctgcaaattgctcatccgacaactttgaaagagcttaccattacaggtcacaacgtggaggcagccttactcgaacagattggacgcagttactcttgttcaaataacaatattcccatgcacagttgctatgatttccttgtaaggttggtcatcaatggtggctgcgactctctaacgaccattccactagatatgttcccaaaactcagggggcttgatatcgggaagtgtcctaacctacagaggatttcacaggggcaggctcataatcatctccagagtctgtatatcaaagagtgcccccaattagaatcattgcctgaaggaatgcatgtcctccttccatctcttcattatctgagcataagggattgtccaaaagttgaaatgtttcccgaaggaggtttgccatcaaatttaaaaggtatgagactccatggtagttacaaacttatgtcctcattgaaaagtgccttgggaggcaatcactctctaattagcttatatattggaggagtggatgttgagtgtcttcctgacgaaggtgtactgccacactctcttgtttctctatggatcagtgactgtgaagatcttaagagactggactacaaaggtctctgccacctctcctctctcaagaacttgtttctttatgactgccccaggctccaatgcttaccagaggagggtctgcccgaatccatgttatctttgcacatttacgattgtccgttgctcatacaacgttgccgggaacccgaaggcgaagactggccaaagattgctcacattgattataaagaatttaatggtgaggttgattataaataa

SEQ ID NO: 396 - DNA, 3306 bp, Hordeum vulgare
  source 1..3306: mol_type = genomic DNA
atggtgagcgccttggcaggggtgatgacctctgtcatcggcaagctcaccgccctgctcggggaggagtacgcaaagctgaaaggtgtgcacagggaggtggagttcatgaaagatgagctgagcagcatgaacgcgctccttcagaggctggcagaggcggaccgtgatcttgatgtgcagacgaaggaatggagggaccaagttcgggagatgtcttacgacattgaggattgcatagacgactttatgaaaagccttggccaaactgacagtgctcagacagcagggcttgtgcaaagtgtggtccagcagctcaaggcgctgagggcgcgccatcaaatatccagcaaaatccaggggctcaaggcacgtgttgaagatgcaagcaagcgacgtatgaggtataagcttgatgagcgcaccttcgagcctagcatctcaagggctatcgaccctcgtttgccttcactctatgctgagcctgatgggcttgtcggtattgacaagccaagagacgagctcattaagtgcctaatggaggggatgggtgcatcagtgcagcagcaaaaggtgttatctattgtgggtcctgggggtctcggtaaaactacacttgccaatgaggtgtaccgtaaactggaaggccagttccagtgtcgagcttttgtttccttgtcacaacaaccagatgtgaataagatcttaagaaatatactctctcaagtctgccagcaagagcttcctagcacaagtgtacaggacgagggaaaactcattgacgcaatcagagaagttttaaagaacaagaggtacattcaccaactttgaattagttggctgttggtactgcatcattttttcttcagcattgatgcttatttagtagcctagccattctactatagtctactgttgtttaattaaattaaatatagatgattttgtttcattttaagcatatatatgcaattgtgaatagtgctttgattcacagttcatgaggttatctatctaaagggctcaaaagacttcctttaaatatcgtaaccccctatgataaattcaactttttgtggtgtggccaaaccattggggaaggggataatggctgtctgtaatagtaatatatagaagagaaatgattctgtccccataaacagtgaatttcaagaaacctgaagccctatatcattctcatgatttactaacatttgacgacaaggaaacatgccattttatttatttgttcacatattttccttattcatgagatttgcaaaacatgcactttgcaggtacttagttgttattgatgatatatggagtactcaagcatggaagattatcaaatgttctttgtttctgaatgacctgggaagcagaataatgacgacaacacgtagtattgatatagccaagtcatgttgctctcggcgccatgatcgtgtctatgaaataatgcctctgacgacagccaactctaagggtttattttttaaacgaatatttggctcagaagatatatgtcctcctcaattggaagaaatctcctcggaaatattaaaaaaatgtggtggttcaccattagcgattcttacaatagcaagtttattggccaataaagatagcacaaatgaagaatggaagtgggtgtataattcgatcggttcgacactgggaaaggaccccggtgtagaagagatgagaaggatactatctcttagctacgatgatcttcctcaccatttgaagacatgtttattgtatctgagtatatttccggaggactatgagattgagagggatcgattgataaggaggtggatcgctgaaggattcattgatacagatggtggacgagatttggaggaaataggagagtgttattttaatgatcttatcaatagaagtatgcttgagccagtgaaaatccaatatgacggtcaagtcgtttcatgccgagtgcatgatatgattctggatctccttgcatctaagtcaattgaagaaaactttgccaccttctctggtaaccaaaatgagatattagtccttcggcataagatccgtaggctatctctcaattattatgccctagagcacaccatgcttccatcaacagcgatcatttctcattgccgttcgctcagtattgtcgggtatgctgaaaagatgccttctctttcgaagtttcgtgttctgcgagtacttgatattgagaatggtgaggagatggagagcaactgttttgagcatctaaggacgcttttccagttgaggtatttgcgactccacgttagaagtatttctgcactccctgagcagttaggagaactacagcatttgaggactctggatatgggctggacaaagatcacaaaaatgcccaaaagcattgttcagctgcaacatttgacatgtttgcgcgtcagtaatttggaattacctgaagggattgggaatctgcaagctctgcaggagctatcagatatcaaagtcaaccggcacagcacggcgtcttgtttgctggagctgggcagtctgaccaaactgaaaatccttgggctacgctggtcaattgtcagtacacacggtaacgaagacacttttgtggataacttggtatcctcgctgcgcaaactgggcagatccagccttcgatccatatgcattcgtagttatcatggctataccatggagttcttactggactcctggttcccctcccctcatctcatgcaaaagtttcagatgggcacgtactacaacttccccagagttcctccttggatcgcgtcgctggacaagctcacatacctagatatcaatatcgatccagtagaagaggaagcactggagatccttggagaattgccttctttgctgtttctctggctgacatcgaaatcggctgctcccaaacagcggctcgtcgtaagcagcagcatgtttgtgcgtctgaaggagctccacttcacctgctggagcaatgggcaaggactgatgtttgaggccggggccatgccgaggctcgagaagctgtgggttccgtttgacgcaggcagcggtcttgattttggcatccagcacctctcttccctcacgcatcttgccgtcgagatcatttgcgtcggcgcgaccgctcgggacgtagaggcgttggaggaggccatcagaggtgcagcccgtctccttccgaaccgccctgcggtggaattccgaacatgggatgatgaaaagatggtggtggaggaggaggaggggcaaggcgtccctgaagaggagatccacgctagcggttga

SEQ ID NO: 397 - DNA, 3306 bp, Hordeum vulgare
  source 1..3306: mol_type = genomic DNA
atggtgagcgccttggcaggggtgatgacctctgtcatcggcaagctcaccgccctgctcggggaggagtacgcaaagctgaaaggtgtgcacagggaggtggagttcatgaaagatgagctgagcagcatgaacgcgctccttcagaggctggcagaggcggaccgtgatcttgatgtgcagacgaaggaatggagggaccaagttcgggagatgtcttacgacattgaggattgcatggacgactttatgaaaagccttggccaaactgacagtgctcagacagcagggcttgtgcaaagtgtggtccagcagctcaaggcgctgagggcgcgccatcaaatatccagcaaaatccaggggctcaaggcacgtgttgaagatgcaagcaagcgacgtatgaggtataagcttgatgagcgcaccttcgagcctagcatctcaagggctatcaaccctcgtttgccttcactctatgctgagcctgatgggcttgtcggtattgacaagccaagagacgagctcattaagtgcctaatggaggggatgggtgcatcagtgcagcagcaaaaggtgttatctattgtgggtcctgggggtctcggtaaaactacacttgccaatgaggtgtaccgtaaactggaaggccagttccagtgtcgagcttttgtttccttgtcacaacaaccagatgtgaataagatcttaagaaatatactctctcaagtctgccagcaagagcttcctagcacaagtgtacaggacgagggaaaactcattgacgcaatcagagaagttttaaagaacaagaggtacattcaccaactttgaattagttggctgttggtactgcatcattttttcttcagcattgatgcttatttagtagcctagccattctactatagtctactgttgtttaattaaattaaatatagatgattttgtttcattttaagcatatatatgcaattgtgaatagtgctttgattcacagttcatgaggttatctatctaaagggctcaaaagacttcctttaaatatcgtaaccccctatgataaattcaaccttttgtggtgtggccaaaccattggggaaggggataatggctgtctgtaatagtaatatatagaagagaaatgattctgtccccataaacagtgaatttcaagaaacctgaagccctatatcattctcatgatttactaacatttgacgacaaggaaacatgccattttatttatttgttcacatattttccttattcatgagatttgcaaaacatgcactttgcaggtacttagttgttattgatgatatatggagtactcaagcatggaagattatcaaatgttctttgtttctgaatgacctgggaagcagaataatgacgacaacacgtagtattgatatagccaagtcatgttgctctcggcgccatgatcgtgtctatgaaataatgcctctgacgacagccaactctaagggtttattttttaaacgaatatttggctcagaagatatatgtcctcctcaattggaagaaatctcctcggaaatattaaaaaaatgtggtggttcaccattagcgattcttacaatagcaagtttattggccaataaagatagcacaaatgaagaatggaagtgggtgtataattcgatcggttcgacactgggaaaggaccccggtgtagaagagatgagaaggatactatctcttagctacgatgatcttcctcaccatttgaagacatgtttattgtatctgagtatatttccggaggactatgagattgagagggatcgattgataaggaggtggatcgctgaaggattcattgatacagatggtggacgagatttggaggaaataggagagtgttattttaatgatcttatcaatagaagtatgcttgagccagtgaaaatccaatatgacggtcaagtcgtttcatgccgagtgcatgatatgattctggatctccttgcatctaagtcaattgaagaaaactttgccaccttctctggtaaccaaaatgagatattagtccttcggcataagatccgtaggctatctctcaattattatgcccaagagcacaccatgcttccatcaacagcgatcatttctcattgccgttcgctcagtattgtcgggtatgctgaaaagatgccttctctttcgaagtttcgtgttctgcgagtacttgatattgagaatggtgaggagatggagagcaactgttttgagcatctaaggacgcttttccagttgaggtatttgcgactccacgttagaagtatttctgcactccctgagcagttaggagaactacagcatttgaggactctggatatgggctggacaaagatcacaaaaatgcccaaaagcattgttcagctgcaacatttgacatgtttgcgcgtcagtaatttggaattacctgaagggattgggaatctgcaagctctgcaggagctatcagatatcaaagtcaaccggcacagcacggcgtcttgtttgctggagctgggcagtctgaccaaactgaaaatccttgggctacgctggtcaattgtcagtacacacggtaacgaagacacttttgtggataacttggtatcctcgctgcgcaaactgggcagatccagccttcgatccatatgcattcgtagttatcatggctataccatggagttcttactggactcctggttcccctcccctcatctcatgcaaaagtttcagatgggcacatactacaacttccccagaattcctccttggatcgcgtcgctggacaagctcacatacctagatatcaatatcgatccagtagaagaggaagcactggagatccttggagaattgccttctttgctgtttctctggctgacgtcgaaatcggctgctccgaaacagcggctcgtcgtaagcagcagcatgtttgtgcgtctgaaggagctccacttcacctgctggagcaatgggcaaggactgatgtttgaggccggggccatgccaaggctcgagaagctgtgggttccgttcgacgcaggcagcggtcttgattctggcatccagcacctctcttccctcacgcatcttgccgtcgagatcatttgcgtcggcgcgactgctcgggacgtggaggcgttggaggaggccatcagaggtgcagcccgtctccttccgaaccgccctgcggtggaattccgaacatgggatgatgaaaagatggtggtggaggaggaggaggggcaaggcgtccctgaagaggagatccacgctagcggttga

SEQ ID NO: 398 - DNA, 3921 bp, Nicotiana benthamiana
  source 1..3921: mol_type = genomic DNA
atgttgacttcatcttcccatcatggacgcagttatgatgttttcctaagctttaggggagaagacactagaaaaacatttgtgggtcatctgtttaatgctcttattgaaaagggtattcacacattcatggatgataaggagttaaagagagggaagtcaatctcatctgaactcatgaaagccattggagaatcaagatttgctgttgttgtcttttccaagaactatgcttcctctacatggtgcttggaagaactggtaaagattcttgaaattcatgaaaaatttgagctaattgttgtcccagttttctatgatgtggatccatcaactgtgaggaaacaaaatggggagtatgctgtttgttttactaaatttgaagctaacttggttgatgatagagacaaagtgctaaggtggagggaagcacttactaaggtagctaacatatcagggcatgatttgcgcaacacttacaatggggatgaatcaaaatgcatacaacagatactgaaagacatattcgacaaattttgtttctctatctcaataactaacagagatttagttggaatagaatctcaaattaagaaactaagttcattgttgaggatggacctgaaaggagttcgtcttgttgggatttgggggatgggtggtgtgggaaagacaactgctgcaagagcattgtttaacagatactatcagaattttgaaagtgcttgttttctcgaagatgttaaagaatatctgcaacaccataccttgttgtatttgcagaagactctcctttccaaactgttgaaggtagaatttgtagattgtactgatactgaagaaatgtgtgtaatattaaagaggagactttgttctaagaaagttctggttgttcttgatgatgttaatcataatgaccagctggataagctggtcggagctgaagattggtttggtagtggtagtagaattgttatcacaactagggatatgaaactgttgaaaaaccatgatgtgcatgaaacgtacgagataaaggttttggaaaaagatgaagcaattgagcttttcaatttgcacgcattcaagagaagttcacctgaaaaggagtttaaggagctcttaaatcttgtggtagattatactggaggccttcctttagctcttaaggtgcttggttctctgctgtacaaggaagatcttgatgtatggataagtacgattgatagactaaaagataaccctgagggtgaaattatggctacacttaaaataagttttgatggattaagggattatgaaaaaagtatatttttagatattgcatgtttcttcaggggttacaatcaaagagatatgacagcattatttcacgcttctggtttccacccagttctaggagtaaagacccttgttgaaaaatctctcatttttattttagaggacaaaatccaaatgcatgatttgatgcaagagatgggtagacaaatcgcagttcaagaatcaccgatgagaagaatatatcgtccggaggatgtgaaggatgcatgcataggagatatgaggaaagaagcaattgaaggcttgttactcacagagcctgaacagtttgaagagggtgagttggaatatatgtacagtgctgaagctctcaaaaagacgaggaggctgaggatacttgtgaaagaatattacaacagagggtttgatgagcctgttgcctatcttcctaacagtctgctttggcttgaatggcgtaactactcttcaaactcatttccatcaaattttgaaccgtcaaagctcgtatatcttactatgaagggtagttctatcatcgaactctggaatggtgcaaagaggttagcatttttgacaactcttgatctcagttattgccacaaattgatacaaaccccagattttaggatgatcacaaatttggaaaggttgatcctgagctcttgtgatgcattggtggaagtccatccatctgttgggtttctcaagaatcttattttgttaaatatggatcattgcatatcacttgagagacttccagcaattattcaatcagaatgtcttgaagttcttgatctcaattattgctttaacttgaaaatgttcccggaagtggaaaggaatatgacgcacttgaagaaactcgacctcacttcaactgggataagagaactgccggcatcaattgagcatctcagttccctggaaaacctacagatgcattcctgcaaccaacttgtaagtctccctagtagtatttggagattcagaaatctgaagattagtgaatgtgagaaactggggagtttaccagaaattcacgggaatagcaattgtacccgtgaactcatcttaaaattagtttcgattaaggagcttcccacctctataggaaacctcacctcactaaatttccttgaaatctgtaattgcaaaactatttcgagtctctcgagcagcatatggggattgacaagtcttacaactctaaagttgttagactgcagaaaacttaaaaacttgcccggaattcccaatgccataaatcatttgtcaggacatggacttcagctccttctgacattggagcagcccacaatttatgaacgccttgacttgcttaggattattgatatgagctggtgtagttgtattagcagtctcccccacaacatttggatgttgaaatttttaaggattctgtgcatctcttactgctcgagactggagtatttaccagaaaatttgggtcacttggaacatttggaggaattacttgcagatggtactggtattttaagactaccatcttcggttgcacgtttaaataaacttgaggtcttatcattcaggaaaaagtttgcgattggaccaaaagtccaatattcatcatcaatgctcaatttacctgatgatgtttttggaagtcttggaagcttaggctcagtggtgaagttaaatcttagtggaaatggtttttgtaatttgcctgaaacgatgaatcaacttttttgccttgaataccttgatataacattttgccagaggctcgaagcattgccagagcttcccccaagcatcaaggagctatatgtagatgaacacttggccttgagaatcatggaagatttagtaattaaatgcaaggagttgaatttaatagccgtcacaaaaattgagtaccaaaatttctatcgatggttagactcaatatggtcagatgtgtcagaactgctggagaacagtcagaagcaacaactggatgatatgttgcagcttattcccttttcatatctgtcgacggctaagcgtgaggaagttcttaagattgttatccatggaacacgaattccagaatggttcagatggcaagatagaagtgccacaacgatgtcagtcaaccttcctgaatattggtacactgaaaatttcttgggattcgctatatgctgcagctgctgcttttatcattctgcacgtagttacgatgttgaatttgaggggagcatgcatcattacaattatgattccagttattggaaagagtatgaggaaccaagttatgacttttatgagagagatagcattgagattacagcaaaactaactccccgacataaaggaatgcggactgaagagctcaagaaagtctgttcattttccatgaatgtgttacgtcgtgctactgctgtccctaatatgtgctttgcattttttccatttaacagtctctgtcacatatcaaatttacaggcaaataacccaaatgactatgggatatttgaaacctgtttgagtccaggggacatccgccatcgtggaaaacaatgggggtttaatttggtgtataaagatgaaactggtggcagtgttacacacgaaatgctcataaacagatag

SEQ ID NO: 399 - DNA, 2538 bp, Nicotiana benthamiana
  source 1..2538: mol_type = genomic DNA
atggtggatgcggtggtcactgtattcttggagaaacttctgcatgttctcacagaggagagtaggtttcttactaaatacagacagcagtttgaaaaactgaagaacgagctgctattcatgcaaagctttctcaaagatgcagagaggctcaagaggaaaaacaacacccttaaaggggtcatgtcctgtttgcgagacttaatctttgaagctgaagagatacttgaggactgccagaatcaatctgcagatagcgatcgggctactacatgcttccatcctaaaaggctctctcttcgccatcaaactgggaagtgccttgctaaaatcaatgacagaatctcggagataaagcaaaacatttcaacatatcttggagtaccacttctcgaagaaggaagtatggaggcacacaataatctaatgtcaagatggacttcttccctttatgaccacactcaggtagttggtttggaaggtgacactgagaagataaaggattggctatttgaagcaagagatggtttacttaccattgcatttgtgggtatgggaggacttggtaaaaccactcttgctcagaaagtcttcaatgacaaaagggtggaggatcacttggagaggaggatttgggtgtctgtttctcaaacatttactgaggaacaagtcatgagaagcatattgaggagtttaggagatgcatgtgttggtgatgaccagtgtgaactgttaagaaaaataaaccagtaccttttgggaaagaggtttttgattgttatggatgatgtttggagctgggacaatgcctggtggcaaaaaatctatactggactgcccaaaggaaatgggagcactgttattgtaacaacgagaaatgagctagtcgctcgcaagatgggagttacagaagcaagaatacattggccaaaattcctcaatgagcactacagttggttactattccggaagattgcatttgcaggaagtgcaggtgaatgccatttccccgagttggaggacgtgggaaaggagattgtggaaaaatgcaagggtcttcctttagcaatcaaagcagtaggaggagtgatgctttgcaagccatcttactatcacgaatggaggcgtatttcaaatcatttccgtgatgaattgaaagaaaatgatgactcagtgatggcctcactacagttgagctatgatgaactccctccttacttgaaatcctgtttcctctgtttttcactatttcctgaggattgtgtcataccaaaagaccaactgatccgttggtggattggagaaggtttcatacctctgagaagtggtaggttatcgactgaagtgggagaagattgtttctcacaactatccaatcggtgtttgatagaagttgttgataaggcttacaatggtgtgatccacacatgcaaaatgcatgacatggttcgtgacttggtgatcaaattagccgaggatgatgcatttttcaccccagctgatgcaacttgtcggcatttgggtattaagagtgagatgaattggaagcaactattgagcaatcaaaaattacgagcactgctaacaaccaccaagagtggtgaagttaacaaaatccattccgacattgccaagaagctgtgcaagagtcgacacctccaagtattggatctgtcaaaatcaattttcgatgtgcctctttcaagtttgttggaaggaattggatctgctaagcagctcacttatctcagtttaagcaatacacatccaatgattggagttccagcttccatatccaagcttgaaaaattacagattttggatttcagctattgccaaaatatgaaaatgctcccctcttgcgttctgacatttgaggaacttgctgttttggatgtgaacaactgtggttcccttgagtaccttccaaaaggattaagtaggctttccaatcttcaagtattgcttgggtttaagcctgcaaaattaagccaaccaggaggttgtcgtattgctgagctcagaagcctgactcgactcagaactctcagtttaagactaaccgaaaatgaggagattggagacgatgaggggaacgcactggtagatctccaagaacttcaatttttaacaataagttgctttggcagtcaagataatggacttgcgacaaaacttggtagactttatcctccacgacaactccacgagctgattctcaaattttatccaagtaagacaagtcctgaatggcttaaccccaatctctcccccatgttgcgatatttatcaatcatctctggtgatattacacaaatgcacgagaacttctggggtgatggtagtactgcttggaaaattgagggcttaatgttggaatctttatcggatttgagattggaatggtcagcaatgcatcaagtcatgccttcgttaagaatactcaaggttagctggtgccctgagttggagtcatttccaattgaagatgcagggtttagagggggtctatggaagaaggaagaacataggaactga

SEQ ID NO: 400 - DNA, 8394 bp, Oryza sativa
  source 1..8394: mol_type = genomic DNA
tcctcgagggtatagaccatatttcccctggtttccattgatgtggcatatatcagggcccactacctcaaccatcaccacgtccagtcctttcggcctgttcgcgatgacgagctcggccaccacctcaacatcgtccatgctgcggcgatggcgaggagacagctgggacggtgaacctcatagctccgtctgttgcaacatcctctcgccatgctcacgtcgccacgacacccttgtcctcctgctccgtagcagcctcgcaagctcacgccgcggcctcgtcgaggtcctctgtccccgagccgcttctagcatcgatgagctgaggaactccccactgccgaggcgatgacgatttggcagggagggctcgattcgcccactccaattcgcagcttcacacctcccctccccctcctattcatccaccaccaacgcggataggagaagggatagaggaaggtgtgcgtggacacttacatgttggtcccatatattttttttactcggatgccacgtcagataaaacaaccgtcggtcaacatttttcgtattgcggattaggaacgtcattcatgactcgacgcagagctgagggatggcaagtgaacttattcccataaaacttccaaaagtttggaatgctcaacttgggcttctcttcggatgctgaagtgctaatgggccaaataaccaactagcccacagcccatcgaagtggaagccgacgagtccaccgtcaacgcggcagtagtaatccgagaaaacgcgggtcgcgcgaagcaatcgatcatcatcagacgattaatccacgacgaccaggagcgctgccccgagccacacgcccacacgcactggtgaatcttctcctttccacctagttttcactctgcagtctcctctcctagctactactctgccttcccatcctcgcttgttgcagccctcttgcacacgccattggccacagtccaaggactgctcctgttccgatggaggaggtggaagccggtttgctggagggcgggatcaggtggctggcggagaccatcctggataacctggacgccgacaagctggatgagtggattcgccagattaggctcgccgctgacaccgagaagctacgggctgagatcgagaaggtggatggggtggtcgctgccgtgaaggggagggcgatcgggaacaggtcgctggcccgatctctcggccgtctcagggggttgctgtacgacgccgacgatgcggtcgacgagctcgactacttcaggctccagcagcaggtcgagggaggaggtactgtctttgcatatatccgtgccttttaattaagtttgcaagctgcgttgcctgcaacaatggcgtattggcgtcagtttccaatccatgcttgtgctacagttactacacggtttgaggctgaagagacggtcggagatggagcagaggacgaggacgatattccgatggacaatactgatgtaccggaggcagtggcggcaggcagcagcaagaaacggtccaaggcatgggaacactttactaccgtagagttcactgctgacgggaaggattctaaagcacggtgcaagtactgccacaaggacctatgttgcacatctaagaacgggacatcagctttgcgcaaccatctcaatgtttgcaagaggaaacgtgtaacaagtactgaccaaccggtaaatccatcaaggtaatgctaatggagttctgaatttagtgtaaatccgttgaagtgtaaatttggcccgttacatctgcttaagatctcattctgtctctaatcttctaatagccaactcatggtcattttttttcctaatatatagtaccggtgatggtgcaccaaatgtaattagatgcaaggaaacaaaagtgaacaattgtatatatcaaatataattatatctaaaacatgagtagtgtatcaaatccaattctttcaaaaatctactatgcaaaattgagtgacaaaatctgctgccttttttttttacagaaagcaaccaattaatataagtcaaatataaaaacgctttgtagtctccaataaaatagctcattgtttcgtttatacttatgtttataaatttaaatttaaaacttaattttggagttgattttgtggttttcttttcatcctattttattttacaacatttgattttgaatagttaagaatgcgtatataaaaattttacccataagttattttttaaattgttaataaatcgtaaggataatcataagtataagtgaaacgattcgctcttcatctacttaagattgcgttatattgctgacctttctaatcgcctaaccacgatcacatgctcttccagtgccggtgagggtgcatcaaatgcaactggtaattcagttggcagaaaaaggatgagaatggatgggacttcaacacaccacgaggcagttagcacgcacccttggaacaaggctgaactttccaacaggatccaatgcatgactcatcagttagaagaggctgtaaatgaggttatgaggctatgtcgatcctcaagttcaaaccagagtcgacagggtacaccaccggccacaaatgcaacaacatcgtcttatcttccggagcccatagtgtatgggagggctgcagagatggaaaccatcaaacagctgatcatgagcaatagatctaatggcataaccgtcctgccaattgtaggcaatggagggataggaaaaaccactttggcgcaactggtctgcaaagatctggtaattaaaagtcagtttaatgttaagatatgggtgtatgtatctgataaatttgatgtagttaagattacaaggcagattttggatcatgtctccaaccagagccacgaaggaataagcaaccttgatacgcttcagcaggatcttgaggaacaaatgaaatctaagaagttcctcattgtcttagatgatgtgtgggaaatccgtacagatgactggaaaaaactactggctcctttaagacctaaagatcaggtgaattcgtcacaggaagaggcaacaggtaatatgataattttgacaactcgtatacagagtattgccaaaagtcttggaacagtacaatcaattaagttagaagctctgaaagatgacgatatatggtcactatttaaagtgcatgcttttggtaatgataaacatgatagtagtccaggcttacaggttcttgggaagcaaattgctagcgagctaaaaggcaacccactggcagcaaaaactgtgggttcactattaggaacgaatcttaccatcgatcattgggatagcattataaagagtgaagaatggaaatccctgcaacaagcttatggcatcatgcaagcgctgaagttgagctatgatcatctatccaaccccttacagcaatgcgtctcttattgttctcttttccccaagggttattctttcagcaaagcacaactaatacaaatatggattgctcaaggatttgtggaagaatccagtgagaagttggagcagaaaggatggaaatatctagctgagttggtaaattcgggtttccttcagcaagttgaaagcacacggttttcatcagaatattttgttatgcacgatcttatgcatgatttagcgcaaaaggtttcacaaacagaatatgcaactatagatggctcagagtgcacagagttagccccaagtatacgccatttgtcaatagtaactgattctgcataccgcaaggagaaatatagaaacatatctcgtaatgaggtgtttgagaaaaggttgatgaaagttaagtcaaggagtaagttgaggtcactggtattaattgggcaatatgattctcatttttttaaatatttcaaagatgctttcaaggaagcacaacatctgcgactgctgcagatcactgcaacttatgctgattctgattcatttctctccagtttggtaaattctacacatctccggtatctgaaaattgtgaccgaagaatccggcagaactttgccccgatctctaaggaagtattaccatcttcaagtactagatattggctatagatttggaattccccgtatatctaatgatataaataatcttctcagcctgcggcatcttgttgcatatgatgaagtgtgttcttccattgctaacattggtaaaatgacctcacttcaggaactaggcaattttattgttcagaataatttaagtggttttgaggtgacacaattgaaatccatgaacaagcttgtacaacttagtgtgtctcagcttgaaaatgttagaactcaggaggaggcatgtggggcaaaactgaaagacaaacaacacttagaaaagctacatttgtcctggaaggatgcatggaatggatatgacagtgacgaaagctatgaagatgaatacggcagtgatatgaatatagaaacagaaggggaggaactgtcagttggtgatgccaatggtgcccaaagcttacaacatcacagtaatataagctctgaacttgcttcaagtgaggtgctcgaaggtcttgaaccacatcacggcctcaagtatctacggatatctgggtataatggatctacctccccaacttggcttccttcttcacttacctgtctgcaaacacttcatctagaaaaatgtggaaaatggcaaatacttcctttagaaaggctagggttacttgtaaagctcgtgttgatcaaaatgaggaatgcaacagaactctcaatcccttcactggaggagcttgtgttaattgcattgccaagcttgaacacatgctcctgcacttccatcaggaacttgaactccagtttaaaggttctgaaaattaagaattgccctgtactgaaggtatttcccttgtttgagatttcccagaaatttgaaatcgagcggacgtcgtcatggttgccccatcttagcaagcttaccatctataattatcctctttcctgtgtgcacagttctctgccaccttccgcaatcagtggttatggagaatatggaaggtgtacccttccgcaatcacttgaggaactttacatccatgagtattctcaagaaactctgcagccctgcttttcagggaacctcactctcctgagaaaattacatgtactgggaaactcaaatttagtgtctctgcagctccattcctgcacagcactcgaagagttgataattcaaagctgtgagtctcttagttctctggatggcttgcaattgcttggcaatctcaggttgctgcaggcacatagatgcctcagtggtcatggagaagatggaaggtgtatccttccgcaatcacttgaggaactttacatccatgagtattctcaagaaactctgcagccctgcttttcagggaacctcactctcctgagaaaattacatgtactgggaaactcaaatttagtgtctctgcagctccattcctgcacagcactcgaagagttgataattcaaagctgtgagtctcttagttctctggatggcttgcaattgcttggcaatctcaggttgctgcaggcacatagatgcctcagtggtcatggagaagatggaaggtgtatccttccgcaatcacttgaggaactttacatccatgagtattctcaagaaactctgcagccctgcttttcagggaacctcactctcctgagaaaattacatgtactgggaaactcaaatttagtgtctctgcagctccattcctgcacagcactcgaagtgttgataattcaaagctgtgagtctcttagttctctggatggcttgcaattgcttggcaacctcaggttgctgcaggcacatagatgcctcagtggtcatggagaagatggaaggtgtatccttccgcaatcacttgaggaactttacatccatgagtattctcaagaaactctgcagccctgcttttcagggaacctcactctcctgagaaaattacatgtactgggaaactcaaatttagtgtctctgcagctccattcctgcacagcactcgaagtgttgataattcaaagctgtgagtctcttagttctctggatggcttgcaattgcttggcaatctcaggttgctgcaggcacatagatgcctcagtggtcatggagaagatggaaggtgtatccttccgcaatcacttgaggaacttttcatcagtgagtattctctagaaactctgcagccctgcttcctgacgaatctcacctgcttaaaacaattaagggtatcaggcaccacaagtttcaaatctctagaactgcaatcatgcactgcactcgaacatttgaagattcaaggttgtgcgtcgcttgctacattggaggggttgcaattcctccacgccctcaggcatatggaagtattcagatgccctggcttgcctccatatttggggagttcgtcagagcagggctatgagctatgcccacgactggaaaggctcgacatcgatgacccctctatccttaccacgtcgttctgcaagcacctcacctccctccaacgcctagagcttaactattgcggaagtgaagtggcaagactaacggatgagcaagagagagcgcttcagctcctcacgtccctgcaagagctccggtttaagtattgctacaatctcatagatcttcctgcggggctccacagccttccctccctcgagaggttggagatccggagttgcaggagcatcgcgaggctgccggagaagggcctcccaccttcgttcgaagaactggatatcatcgcttgcagtaatgagctagctcagcagtgcagaactctagcaagcactctgaaggtcaaaattaatgggggatatgtgaactgattactcggtggcttgttaggcgcacctttttccacctgcccaactggcgtgggctcgttcaggcgttcaagctgctgtaaattccattgccgcaatgacgaccttcagaaccgttacacaatacaaaggacatatgatggctagatcaactgtcgcagagctagctttggttcacctgaaaacataaggccaaacgcgtggttcttttaatcagaagtatcaaaaattggttttggtttttaacgaaaagatgttagaaattggttttaatgtgccagattctgtaccagaattctgtattttgctccgtaattctgtgctacgactgatgttgtatttaactgatagcaatcgaccggcaaaaccaatccgctccaatgcattgtcacatacaaattctataattctatctactgaaaaggatgattgctgttcattttcgtgattacagaaggaactgtgtatatcgtgctatttttgcattcacattgtgtcccaggttgtgctcggatcagccaatttcggtggttaattcactttgttgtgtcctctgtgcactcaagaattgttcgcacatgcaattcagttgagcatcgcactacgcaagttttttttgttaacaaaggagtggttgacagcattgcaggttgctaaaaccgtgtcaaaaatttgctaacaaaagaattctcttcagaaatagtatgaaaataaatgccacataagtaatctgagtaaaacagacagaatcactagagaagactaacgacaaaatcttctttttcaatttctgtggtgaaaaactcactaactccgcatataatctcatgtatgcattggaggtgcataccatttcgatcatgtatgcatttagctgaacattatcaagaagcaaatttattgcacgggcaaacataagctaaactaattctcaagcaatttaataatcacaaaacagtctgcaataccaagatatataaaacttttgccagcatggagcaacaacaccgaaacactacaatcaagacagctcccagaaaagattatatgttgctacttcaattgccacagttacaatcacccataatgacacatcaaattacataagagtattaagagtatatgacagttgtaacaaaacaactgcattgagaactagaacagacagccacatgaaccatattcacttcttcagatcagaaagcctggtgaactaccagtctaccaattgctaccgtagtctccatttttcacttatatgtacataggacacctgcgctatcagaatagccacaaagccagttcactcgctacaaattaatcttgactaaatccaaacagataccaactcctcttaatcaacttacaaaacacctacacttttggtgtctctacaccaccaatcacacaaaaggaaattaatcatccaccaactcgtatcctactgttagaatggaggccttacaccagagaatgggcattgccagattctgagacactgtcctttgagctccctga

SEQ ID NO: 401 - DNA, 3441 bp, Solanum lycopersicum
  source 1..3441: mol_type = genomic DNA
atggcatcttcttcttcttcttctgcaagtaattcaaagtattatcctcgatggaagtacgttgtttttctaagtttcagaggtgaagacactcgaaaaacatttacaggtcacttatacgaaggtttgagaaatagaggaataaacacatttcaagatgataaaagactagagcatggagattcaattccaaaagaactcttgagagctatagaagattctcaagttgcacttatcattttctcaaagaattatgctacatctaggtggtgcttgaatgaactagtgaagatcatggaatgcaaagaggaagaaaatggacaaacagtcataccgatcttttataatgtggatccatcacatgttcgataccaaactgaaagctttggagcagcatttgccaaacacgaatcaaagtataaggatgatgttgaggggatgcagaaggtgcaaagatggagaactgccctaactgctgccgcaaatctaaaaggatatgatatccgtaacgggattgaatcagagaatattcagcagatcgtagattgcatctcttccaaattttgtacgaatgcttattctttatcttttttgcaagatattgtgggaataaatgctcacttagagaaactaaaatcgaaacttcaaatagaaatcaatgatgttcggattttagggatctggggaataggcggagtcggtaaaacaagaatagcaaaagccatttttgatactctatcttatcaatttgaagcttcttgttttcttgctgatgttaaagaatttgcaaaaaagaataaactgcattctttacaaaatattcttctctctgaactgttaaggaaaaaaaatgattacgtctacaacaagtatgatggaaagtgtatgattccaaacagactttgttctttgaaggttctaattgtgcttgatgatatagatcatggtgatcagatggagtatttagcaggtgatatttgttggtttggtaatggcagcagagttattgtaacaactagaaacaaacatttgatagagaaagatgatgcgatatacgaagtgtctacactgcctgatcatgaagctatgcaattattcaatatgcatgcttttaaaaaagaagttccaaatgaggattttaaggagttggcgttagagatagtaaatcacgctaaaggcctccctttagccctcaaggtgtggggctgtttattgcataaaaaaaatctctctttatggaaaataacagtagagcaaataaagaaagactctaattcagaaattgttgaacaactcaaaataagttatgatgggttggagtccgaagagcaggaaatatttttagatatagcatgtttcttccgcggagagaaaagaaaagaggtcatgcaaattcttaagagttgtgactttggagctgaatacggattggatgttctgattaataaatctcttgtgttcatatctgaaaatgacaggattgaaatgcatgatttgattagagatatgggtagatatgtggtgaaaatgcaaaagcttcagaaaaaacgtagcagaatatgggatgttgaagatttcaaagaagtgatgatagactatacggggaccatgacagtggaagcaatctggtttagttgctttgaagaagtacgttttaataaggaggcaatgaaaaaaatgaaaaggcttaggatattacacatatttgatggttttgtcaaattcttctcttcgcctccctcttccaattccaatgattcagaagaagaagatgattcctacgacttagtcgtagatcaccatgatgactctattgagtacctgtccaataacttgcgttggttagtctggaatcactattcttggaagtcattgccagaaaattttaaaccagaaaagcttgttcatcttgaactccgttggagttcgcttcattatttatggaagaaaacagagcatttgccgtctctacgaaagctagatctcagcttatctaaaagtctggtgcaaacaccagatttcacggggatgccaaatttggagtatttgaatctggagtactgtagtaagcttgaagaggttcactattccctagcatattgcgaaaaactcattgagttaaatttgagttggtgtacaaagcttaggagatttccatatattaacatggaatctcttgaatctctggatctacaatattgctatggtataatggtgtttccagaaatcatcggaacgatgaagccggagttaatgattctctcagcaaacactatgataactgaactaccatcatctcttcagtacccaactcatctcacagagctagatttgagtggcatggaaaaccttgaagctcttccaagcagcattgtcaagttgaaagatttggtgaagctaaatgtgtcgtactgcttaacgcttaaaagcttgcctgaagagattggtgatttagaaaacttggaggaacttgatgcttcgcgtactctaatttcacagcctccatcttccattgtccgcttgaacaagcttaaatccttgaagttaatgaaacgaaacacattaacagatgatgtgtgctttgtgtttcctcctgtgaataacgggttactctcattggaaattctggagctcggttcctccaatttcgaagatggaagaattccggaagatattggatgtttatcctctttgaaagagttacgtctcgagggagataatttcaatcatttgcctcaaagcatagcccaacttggtgcacttcgattcttatacataaaagattgcaggagtcttacaagtctgccagaatttccaccgcaattagatacaatatttgcagattggagcaatgatttgatctgtaagtcactgtttctaaatatctcatcattccaacataacatctctgcttcagattcgttgtcgttaagagtgtttacgagtttggggagtagtatcccaatctggttccaccatcagggaacagatacaagtgtttcagtcaatttgcctgaaaactggtatgtatcagataacttcttgggattcgctgtatgttactatggcaatttaactgagaacacagctgaattgattatgagttctgcagggatgccatgtatcacctggaaacttttgttatcgaatcattcagaatgtacatatattaggattcattttttcttggtaccttttgctggcttatgggatacatctaacgccaatggtaaaacaccaaatgactataagcacattatgttatcttttcctcaagaattgaaggagtgtggagttcgtttgttctatgaagatgaatctgtgcttgagaccaccaatgatgaacttaccattggggtaaggaggatcagatacgacgacgacgatagtgaacattatgaggaggctggttgttcctcttctaagaaacaaagatcataa

SEQ ID NO: 402 - DNA, 2718 bp, Zea mays
  source 1..2718: mol_type = genomic DNA
atggcagagattgctgttcttctcgtcctgaagaagattgccatagctctggcaggagagaccctaagttttgctaaaccattgcttgcaaagaagtctgagtcggtggcagcactcccagatgacatgaaactgattagtaatgagctcgagcttatccgggcgtttctcaaggaaatcggcaggaaaggctggaaaagcgaagtgatagaaacatggatagggcaggtccgaagactggcttatgatatggaagacactgtagaccattttatttacgttgttggtacacacgatcagatgggatcatgctgggattacatgaagaagatagccaagaagcctcggcgtctggtttcactagatgaaattgctagtgagattaagaagataaagcaagagcttaaacaactctcggaaagtagagaccgctggactaaacccttggatggcgggagtggtatacctgcaggaagctatgaaactgaaaaggaaatgtatcttcctggacatgattacacaatcagcgacgaggagcttgcaggaattgatgaaaataagcaaaccttgattagttcattaaaatttgaagatccatcacttcggatcattgctgtctggggtatgggtggcgttggaaaaagcactcttgtaaataatgtgtacaaaaatgaaggatccaactttgactgccgtgcatgggtttctatctctcagtcatatagactagaagatatatggaagaaaatgctgacagatctcatcgggaaagataagatagaatttgatcttggaacaatggatagtgcagaactaagagagcaattgacaaaaactctagacaaaaggcagtacctgatcatactggatgatgtctggatggctaatgttttttttaaaattaaagaagttcttgtagataatggccttggaagcagagtaataatcacaacaagaattgaggaggtagcttcactagctaagggtagttgtaagatcaaagtagaacctctgggtgtcgatgattcctggcatgtattttgtaggaaggcatttctgaaagatgaaaaccatatctgccctccagagttgcgtcagtgtggtataaacattgtggagaaatgtgatggtttgccattagcccttgtggcaataggaagcatattgtcgctgagaccgaagaatgttgacgagtggaagctattttatgaccagcttatctgggagctacacaacaatgagaaccttaatcgcgtggagaaaattatgaatctaagttataaatacttaccagactatttgaagaactgcttcctgtattgtgctatgtttccagaagactatctaatacacagaaagagattgattagattgtggatagctgaaggatttattgaacaaaaaggggcatgcagcttagaagacactgctgaaagttatcttaaagaacttatacgacggagcatgcttcacgttgcagagaggaactgctttggtaggattaaatgtattcgaatgcatgatcttgtgcgtgaacttgccattttccaatctaaaagagagggtttcagtacaacttatggtggaaataatgaagcagtgctagtgggatcatattctcgacgagtggctgtgctccaatgcagcaagggcattccatcaaccattgatccatccaggcttcgcaccttaattacattcgacaccagcagagcattatctgtgtggtattcttctatttcctccaaaccaaagtaccttgcagtattagacttatcaagcttgcctattgagactattccaaattcaattggagagcttttcaaccttaggcttttatgcctcaataaaaccaaagtgaaagagctccctaaatctattacaaaacttcaaaacctacagacaatgagtcttgagaatggggagttagtgaagttcccacaagggttttcaaaactgaagaaattgcgacatcttatggtttcacggttgcaagatgtaactttcagcggtttcaaaagttgggaagctgtggagccatttaagggcttgtggactttgattgaactgcaaactctgtatgccattacagcaagtgaagtattagttgcaaaacttggaaatttatcccagctgaggcggcttataatttgtgatgtaaggagtaacttatgtgcacagttgtgtggctctttgtcaaagttgtgccagctgtcacgattaacgataagagcatgcaatgaagatgaagtgctacagctggatcatttgacatttccaaatcctcttcaaacccttagtttagatggacgactgtcagaaggaactttcaaatctccctttttcttaaatcatggaaatgggcttcttaggctaatgttgttttacagtcagctttcagaaaatccagtaccacacctctctgaattgtcaaacttgactaggttatcccttataaaggcatacaccggccaagaattatacttccaagcaggttggttcctgaatttaaaagaactttacttgaagaatttgtcccggctcaatcaaatagacatacaggagggagctttggccagccttgaacgtataacaatgaaacacctcccggagctacgggaggttccagtcggtttcagatttctcaagtccctaaaaacaatatttttttccgatatgcatcctgagtttgaaagcagctttcaaaaggaaatgtag

SEQ ID NO: 403 - DNA, 1005 bp, Oryza sativa
  source 1..1005: mol_type = genomic DNA
acattggtagtagtgcaatgtcagagcttcaatcactgccagacctcaatagactatcactagtgaaccttgaaaaggtttcagacactgaagatgcaagaatggcaaaacttcaagagaaagaaaagctcgagacattgatgttgaggtggaatatggatgctggaaatgccagtagaatagatcatgaagtacttgaaaccctccaacctagccagtgcctgaaaactttggagattgttgcgtatgaaggatatgtatttccatcttggatgacaagaaccgagccatatcttacatctctggttgagataagactagttaatatgagagcatgtgaaaaggcattacctccacttgggatactaccatgtctgaagattgcagagataagtggagttgataatctcagttctattggtgataatttctatggtcataacggcacattcccttcactggagaagctgattctatcatacatgacaagccttgaagtctgggaacagtcatctaggatgaatctgtttcctcgtcttgcagaacttgtcatcattcagtgcccaaaattgagagcactgcatatggagtttccatcgattgaaaagttgattttgtggatgaataacaagatgttgtacagctcgaaggaaggtatgagaggtgtagagaagagcctcgaaaatctttcaatttctttctgtgaagagttgcatgcttcttcaggctgtgagggtctacaggctcttgatcgcctcaagaagttggagatatgtggttgtcatgaattatcatgcctcccacagggtttgcagcatctttcctctctcaccagcttgaaaattgataactgcaacaaattggagattttgccagaatggttggagaacctaccttttctacagataatgtgtttgtctggctgtccaattctgcactccattcctgaaggcctaacatgtagcgacattattgttgaagattgccccaattttaaagaaccat

SEQ ID NO: 404 - DNA, 3102 bp, Oryza sativa
  source 1..3102: mol_type = genomic DNA
atggcggagacggtgctgagcatggcgaggtcgctggtgggcagtgccatcagcaaggccgcctctgccgctgccaatgagacgagcctcctgctgggcgtcgagaaagacatctggtatatcaaagatgagctaaaaacgatgcaagcattccttagagctgctgaacttatgaaaaagaaagatgaactattaaaggtttgggcagagcaaatacgtgacctgtcatatgacattgaagattcccttgatgaatttaaggtccatattgaaagccaaaccctatttcgtcagttggtgaaactcagagaacgccaccgaattgctatccgtatccacaaccttaaatcaagagttgaagaagtgagtagcaggaacacacgctacagtttagtcaagcctatttcctctggcacagagattgacatggattcctatgcagaagacattcgtaatcagtcagctcgcaatgtggatgaagctgagcttgttgggttttctgactccaagaaaaggctgcttgaaatgatcgataccaatgctaatgatggtccggccaaggtaatctgtgttgttgggatgggtggtttaggcaagacagctctttcgaggaagatctttgaaagcgaagaagacattaggaagaacttcccttgcaatgcttggattacagtgtcacaatcatttcacaggattgagctacttaaagatatgatacgccaacttcttggccccagttctctggatcaactcttgcaagaattgcaagggaaggtggtggtgcaagtacatcatctttctgagtacctgatagaagagctcaaggagaagaggtactttgttgttctagatgatctatggattttacatgattggaattggataaatgaaattgcatttcctaagaacaataagaagggcagtcgaatagtaataaccactcggaatgttgatcttgcggagaagtgtgccacagcctcactggtgtaccaccttgatttcttgcagatgaacgatgccataacattgctactgagaaaaacaaataaaaatcatgaagacatggaatcaaataaaaatatgcaaaagatggttgaacgaattgtaaataaatgtggtcgtctaccattagcaatacttacaataggagctgtgcttgcaactaaacaggtgtcagaatgggagaaattctatgaacaccttccttcagaactagaaataaacccaagcctggaagctttgaggagaatggtgaccctaggttacaaccacctaccatcccatttgaaaccatgctttttgtatctaagtatctttcctgaggattttgaaatcaaaaggaatcgtctagtaggtagatggatagcagaagggtttgttagaccaaaggttgggatgacgactaaggatgtcggagaaagttactttaatgagctaatcaaccgaagtatgattcaacgatcaagagtgggcatagcaggaaaaattaagacttgtcgaattcatgatatcatccgtgatatcacagtttcaatctcgagacaggaaaattttgtattattaccaatgggagatggctctgatttagttcaggaaaacactcgccacatagcattccatgggagtatgtcctgcaaaactggattggattggagcattattcgatcattagctatttttggtgacagacccaagagtctagcacatgcagtttgtccagatcaattgaggatgttacgggtcttggatcttgaagatgtgacattcttaatcactcaaaaagatttcgaccgtattgcattgttgtgccacttgaaatacttgagtattggatattcgtcatccatatattcacttcccagatccattggtaaactacagggcctacaaactttgaacatgccgagcacatacattgcagcactaccaagtgagatcagtaaactccaatgtctgcatactcttcgttgtataggacagtttcattatgacaactttagtctaaaccacccaatgaagtgcataactaacacaatatgcctgcctaaagtattcacacctttagttagtcgcgatgatcgtgcaaaacaaattgctgaattgcacatggccaccaaaagttgctggtctgaatcaatcggtgtgaaggtacccaaaggaatagataagttgcgagacttgcaggttctagagtatgtagatatcaggcggaccagtagtagagcaatcaaagagctggggcagttaagcaagctgaggaaattaggtgtgacaacaaacgggtcgacaaaggaaaaatgtaagatactttatgcagccattgagaagctctcttccctccaatctctccatgtggatgctgtgttattctcaggtattattggaacacttgagtgcctagattctatttcatctcctcctcccctactgaggacactcgtgttggatggaattcttgaggagatgcctaactggattgagcagctcatgcacctgaagaagatctacttattgagcagcaaactaaaggaaggtaaaaccatgctgatacttggggcactgcccaacctcatggtccttcatctttatcggaatgcttaccttggggagaagctagtattcaaaacaggagcattcccaaatcttagaacactttggatttatgaattggatcagctaagagagatcagatttgaggacggcagctcacccctgttggaaaagatagaaataggcgagtgcaggttggaatctgggattactggtatcattcaccttccaaagctcaaggagattccgattagatacggaagtaaagtggctgggcttggtcagctggagggagaagtgaacgcacacccaaatcgccccgtgctgctaatgtacagtgaccgaaggtatcacgacctgggggctgaagccgaaggatcttctatagaagtgcaaacagcagatcctgttcctgatgccgaaggatcagtcactgtagcagtggaatcaacggatccccttcccgagcaggaggagagagctcgcagtcgcaggtgatcacgttgacgacgaatgatagcgaagaagataggcacagctcaagctggctga

SEQ ID NO: 405 - DNA, 4288 bp, Oryza sativa
  source 1..4288: mol_type = genomic DNA
caccgagtgtgagcggcaacggcggtcagggagcaggcgtggctcgtcggcgagcggctacgggcaacggcgccttggcgtcaggcatccgccgtcactcacctcaagcttgcgggctctgcgaccaccctctcatagtcataggccacagaagcacatttgccttgtgcgtgctgttcgtctgttccactcgtgaacatcagacgcgaagattatagattcacccctgttcacagattcaggtctgtcacgaggcgtatgatcatcaactctgccacaaaatccattcaaaaatagaacagagcaatggaggcgacggcgctgagtgtgggcaaatccgtgctgaatggagcgcttggctacgcaaaatctgcatttgctgaggaggtggccttgcagcttggtatccagaaagaccacacatttgttgcagatgagcttgagatgatgaggtctttcatgatggaggcgcacgaggagcaagataacagcaaggtggtcaagacttgggtgaagcaagtccgtgacactgcctatgatgttgaggacagcctccaggatttcgctgttcatcttaagaggccatcctggtggcgatttcctcgtacgctgctcgagcggcaccgtgtggccaagcagatgaaggagcttaggaacaaggtcgaggatgtcagccagaggaatgtgcggtaccacctcatcaagggctctgccaaggccaccatcaattccactgagcaatctagcgttattgctacagccatattcggcattgacgatgcaaggcgtgccgcaaagcaggacaatcagagagtggatcttgtccaactaatcaacagtgaggatcaggacctaaaagtgatcgcggtctggggaacaagtggtgatatgggccaaacaacaataatcaggatggcttatgagaacccagatgtccaaatcagattcccatgccgtgcatgggtaagggtgatgcatcctttcagtccaagagactttgtccagagcttggtgaatcagcttcatgcaacccaaggggttgaagctctgttggagaaagagaagacagaacaagatttagctaagaaattcaatggatgtgtgaatgataggaagtgtctaattgtgcttaatgacctatccaccattgaagagtgggaccagattaagaaatgcttccaaaaatgcaggaaaggaagccgaatcatagtgtcaagcactcaagttgaagttgcaagcttatgtgctgggcaagaaagccaagcctcagagctaaagcaattgtctgctgatcagaccctttacgcattctacgacaagggttcccaaattatagaggattcagtgaagccagtgtctatctcggatgtggccatcacaagtacaaacaatcatacagtggcccatggtgagattatagatgatcaatcaatggatgctgatgagaagaaggtggctagaaagagtcttactcgcattaggacaagtgttggtgcttcggaggaatcacaacttattgggcgagagaaagaaatatctgaaataacacacttaattttaaacaatgatagccagcaggttcaggtgatctctgtgtggggaatgggtggccttggaaaaaccaccctagtaagcggtgtttatcaaagcccaaggctgagtgataagtttgacaagtatgtttttgtcacaatcatgcgtcctttcattcttgtagagctccttaggagtttggctgagcaactacataaaggatcttctaagaaggaagaactgttagaaaatagagtcagcagtaagaaatcactagcatcgatggaggataccgagttgactgggcagttgaaaaggcttttagaaaagaaaagttgcttgattgttctagatgatttctcagatacctcagaatgggaccagataaaaccaacgttattccccctgttggaaaagacaagccgaataattgtgactacaagaaaagagaatattgccaaccattgctcagggaaaaatggaaatgtgcacaaccttaaagttcttaaacataatgatgcattgtgcctcttgagtgagaaggtatttgaggaggctacatatttggatgatcagaacaatccagagttggttaaagaagcaaaacaaatcctaaagaagtgcgatggactgccccttgcaatagttgtcataggtggattcttggcaaaccgaccaaagaccccagaagagtggagaaaattgaacgagaatatcaatgctgagttggaaatgaatccagagcttggaatgataagaaccgtccttgaaaaaagctatgatggtttaccataccatctcaagtcatgttttttatatctgtccattttccctgaagaccagatcattagtcgaaggcgtttggtgcatcgttgggcagcagaaggttactcaactgcagcacatgggaaatctgccattgaaatagctaacggctacttcatggaactcaagaatagaagcatgattttaccattccagcaatcaggtagcagcaggaaatcaattgactcttgcaaagtccatgatctcatgcgtgacatcgccatctcaaagtcaacggaggaaaaccttgtttttagggtggaggaaggctgcagcgcgtacatacatggtgcaattcgtcatcttgctataagtagcaactggaagggagataagagtgaattcgagggcatagtggacctgtcccgaatacgatcgttatctctgtttggggattggaagccattttttgtttatggcaagatgaggtttatacgagtgcttgactttgaagggactagaggtctagaatatcatcaccttgatcagatttggaagcttaatcacctaaaattcctttctctacgaggatgctatcgtattgatctactgccagatttactgggcaacctgaggcaactccagatgctagacatcagaggtacatatgtaaaggctttgccaaaaaccatcatcaagcttcagaagctacagtacattcatgctgggcgcaaaacagactatgtatgggaggaaaagcatagtttaatgcagaggtgtcgtaaggtgggatgtatatgtgcaacatgttgcctccctcttctttgcgaaatgtatggccctctccataaggccctagcccggcgtgatgcgtggactttcgcttgctgcgtgaaattcccatctatcatgacgggagtacatgaagaggaaggcgctatggtgccaagtgggattagaaaactgaaagacttgcacacactaaggaacataaatgtcggaaggggaaatgccatcctacgagatatcggaatgctcacaggattacacaagttaggagtggctggcatcaacaagaagaatggacgagcgtttcgcttggccatttccaacctcaacaagctggaatcactgtctgtgagttcagcagggatgccgggcttgtgtggttgcttggatgatatatcctcgcctccggaaaacctacagagcctcaagctgtacggcagtttgaaaacgttgccggaatggatcaaggagctccagcatctcgtgaagttaaaactagtgagtactaggctattggagcacgacgttgctatggaattccttggggaactaccgaaggtggaaattctagttatttcaccgtttaagagtgaagaaattcatttcaagcctccgcagactgggactgcttttgtaagcctcagggtgctcaagcttgcaggattatggggcatcaaatcagtgaagtttgaggaaggaacaatgcccaaacttgagaggctgcaggtccaagggcgaatagaaaatgaaattggcttttctgggttagagtttctccaaaacatcaacgaagtccagctcagtgtttggtttcccacggatcatgataggataagagccgcgcgcgccgcgggcgctgattatgagactgcctgggaggaagaggtacaggaagcaaggcgcaagggaggtgaactgaagaggaaaatccgagaacagcttgctcggaatccaaaccaacccatcattacctgagctcctttggagttactttgccgtgctccatactatcctacaagtgagatcctctgcagtactgcatgctcactgacatgtggacccgaggggctgtggggcccacatgtcagtgagcagtactgtgcagtactgcagaggacctgcatccactatcctatattataatggattgtactatcgatccaactattcagattaactctatactagtgaacttattttt

SEQ ID NO: 406 - DNA, 11516 bp, Oryza sativa
  source 1..11516: mol_type = genomic DNA
aagcttgaaagtgtgtgaagaaatgaagaaagtgaagtctacttataggacaggtataacggttatgagaagtggaaatgtccgaactgccccgcaaccgccatcagggagtgatctggagcgtccacgccaaaccccaggatcaacggtgatcaccagggttcggctgaacctgggctgggccagatggcttccaaacctagtctgggtctcctcctcgacctgccttatccaattcttgcaattttgggatgtttctttagtagtttaaaagcccattcttgcattgatagatttctccttcacttttagtctggatttcctcccaacttctgggtttatcacctgcataaaaatatacatcaacaattgtggaatatgtgagttttaacacctatcactatgttggatattttattatctggactttatgcagacgttgacggtatagatttggcatttaacagtcgccaacattatacaatcgggtaaatagtattgatgtattccatgaatctgtgtatagaaggtatgccatatccttgacactgacaccatatgtgtttccgtttttgagaaaacatttccatttccaaaaatttctgaccaacactctctatttccgaaaactcatctgaaatccgaaaacttttcaaaccgttttcatcccagtaatgaatggcaggctctacgtgcagacccacaaatgctccacaaagatctcaaaaaatttatcgtataaatttcatacgtagactaaatttcacaaaaattcacttgtgtacccattgaggtatgtattttgttttcaaaaaaaaacacagtttaccttgtggtgctcgggacatcggccggagctcatgatcataatggagtcagtcagggtggctactggagcttatggcggaggaggtcagggtggtgggacgtggggcagagtttagtccggtcggcaaccagagctccgagaggagatctgggcagtagtgagagaagggtcaggaggcgccagagtggccacgacggaggctgggaaagcgatgccgaacagcaaagcatgcgttgaagtaggcggggtggcagcagcctcggggcggagcgggcatggaacaagggtagagctggagtcggtggccggctactgagaccattcacagtgcgtcaccaagttttgatattcttcacatgccacgtagatcagagcggtattagccacatgttacatagtgcaaaactctacaagaccacatatgggttgcttgtagtgggtcccactaataccacttttacacttctctttttacttttcccctctcctctctcccctctcttcctttccccaccggccaccgcagagagccgggcggagacggaggttgcgggggtcgggcggagcggcggctcaagcggaggtcgtggaggcgagcaggagacggcgccgggccgagtggcgacggcggtggggcctagcaccgtgcctcccctcctcctcctcctctagtggtggcgaatcgaggaagccgccgccgccgcgccccacctcttcatctgatgcgggcgggaagctgccgccaccgccgtcgggcagatccagatctccggcctccgtgtcgggcggctacgcggcggcgggcgtcggcgtcggtcagcgccctcctcacctggccagcccaccgactagccctaccgtcgtcatcatccctggtcagcaccctcctcccctggcattcggctgcctcacccctctcctctctctcctctagcggtggtgtgggtcccacctgtgggtccctctgagacgaagaacgcgtagtcaactttggctacgcgcggagctgaggaacgcacacgattggataaagtggcaaaggaatatttgcttttttggttgaggctaaatgctacgtagatctactgtgaatggcctgatggcgcagcggctctcttgcgggacagagtgggacgtgcacgacgagaaatttcctcttgcatgaataacccacggatgtaggcctccttaactaggagctacgaggtgggatttgggaggctttttctatttcaaggcttaaagcctatccaatatgatctctaatcttaaaatttagtgtttatttttgaaaaaaagttggctccaataattttcctaattagcttccaaaaattggaatcttactccctatccttctcgctctccactagtggagaagcgtgctagttcttaacacacgcatgggtggagggatcacatggatattatggaaatatcctcatggactggtgattaacatagtcctactaggagagaattgagtttattctatatcgttatcgacgtttggtatcacgactacgttatttggatggtatggggatcatcggtactagagtatatgcgagattgaggtaaaagagatggagacagatatttttatactggttcgccccttatctaacaggtaatagccctacatcctgttggctaaagccggtattgctcttattcatctgaatcgcacaagtataatatttaggataacctgtctagctgtcatcgacttggcggcatggataaccaactcgtagtcgatgacggggtagtatttctcttcgaatatgaactcgtcgagatcagagatggctctagatctctcttgccggtctcaggaggcaccagatggggtatgcctaggctaatctctaatgtcgatatttagcggcgtattggcttgtgtgtatgttatgtgttgtggctcgtcatctctcctcctagggggcttgtatttatacccatagatgcccccttgtctaagtagaactagggagataaatatggatacgatccgagtagtccttgtcgtttccatatagaactctttttgtcctttcttatccgaaactccttttatatacgaggtatgattccatataagacatggtatatggtgggccctgccgagcttagtcaggaatgtggtatccacaaccctgacaatcatgcagggttcattgtctccgagttctacgcggagactaagacaactcaaggtataaaaggcgcactctctaaggggttcaaaagagcaaatcatagcacgaacacacccaccatagtttacgaagccagaggctgtgaagcctactcgccaggagatcttgtcgactcatctcgacaaggatctcgccggtaacgctggattcatctcttctctttgtactccgtggtttccatatcaatctcatataaactggattatggttattatcttacgaggggtctaaaccagtataatctttgtctctctgattgttttaatatcgtatcatgtagatcctcataccaacttaccctaatacactatttatccgatctacaggtatcccctatcgacaataggtatataagatattataaaaaagatggagacatatgtgagctgatgatttaggctgcattcgttgcagcttctttccaacccatctccctcgttttccgtgcgcatgcttttcaaactgctaaacggtgcgttttttacaaaaagtttatatacgaaagttgcttaaaaaaatcatattgatccattttttaaaaagatagcaaaaaattaagtaatcacacgctaatggactactctgttttccgtgccggaggatagctttcccaacccagggaaacgaacccaaccttaggtgtgttcattgctaggtgttcccaacccctctcccttatattccgtgcgcatgcttttcaaactgttaaacggtgtgtctctttttaaaaaatttctatacgaaagttgctaaaaaaatcatatcaatacatttttgaaaaaaaaagctaatacttaattaatcacgtacgtactaatagaccgcttcgttttctatgcgcagaagatttgttcccaacccccacaacaaacacagccttaacatgcttgcatttaaaaagctataaaatttaataaattataaaattatagataatataacatgcttacttgatgtgacactttacctgttaagttttaggagtcggtgtttagattcaaactttttttttcaaacttccaacttttccatcagatcaaatgtttgggcacatgcattcagcaataaatgtggacaaaaaaaaaccagttgtacagtttgcatgtaaatcacgagatgaatcttttgagcctaattacgtcatgatttgacaatgtggtgctaaagtaaatatttactaatgacagattaattaggtttaatagatttgtctcgcagtttacaggcgaaatatataattttttttgttattagtttatatttaatacttaaaatgtatgtccatatacttaaaaaaattttgtaccacgaactaaacacagccaagtggactctaactctctctctctctatatatatatatatatatatatagtaatgtgttcgtatgtcctggatagaaactcatttcctccgcatagaaaacggagcggtctattaatacgtgattaattaagtattagctatttttttcgaaaataaattaatttaattttttaaataacatttatatagaaactttttaaaaaacacgttgattaaccatttgaaaagcgtgcgtgcacgcggcgtgaaaaatgaggcagagatgttgtgaaaaggagtgccgaacacagtcaaagcctcaggtggtgtttggatccagggacttaacttaaactttagtccctatatttagacactaatttatagtattaaatatagactacttataaaactaattacataaatgaaagctaattcacgagacaatttttttaagcctaattaatccataattaaagaatgtttactgtagcatcacataggctaatcatggattaattagacttaatagattcatctcgtgaattagtccaagattatagatgggctttattaatagtctacgtttaatatttataattaattttcaatccaatatgataggacttaaaatttagtcccatctacagggtcagaggattcggtcggtctcagggcagtcctctccgtataacgcagcgcccgatattttttatgggcataaatagtctgattgctactgtagcattttgttcaactaactccccaatgggcaatggctagtcgtcgagtgtcagtagtcaagagtagactccgcttcgcttcgccgtaccttctctcttctcgttctcctatttcacaaatcacaaccggattgctttcttccttcctccggtctggtccccaacctccgcggcagccatggttggcgccgagatgcttgtggccgcggcggtgagccaggtcgcccggaagatcaacgacatcgtgggggtcgcgcagggcgaggtgaagctgtgctgcaatttcagcgacgatttggagggcatcaaggatacccttgtgtacctggaaaccttgctgaaaaatgcggagaataactccttcggaagcgacagggccaacctgcgccactggcttggccagatcaagtccctggcttacgatatcgaagatatcgttgatgggtactactcttccaaggagcagttcgatgggggcagctatgcacagaaggtaacagaatctcattcctttttcttcatcggtaaaatttcttcaatttcaactcaattttagaatgccccgcaaaaaaaaaatcaattttagaatggatctacattaatgagatgtagaggtgtattactatgggcaggggaagcaccgtgtgtgcatccttagttactgcataggcaataagttatcctttccattgtccaaaaaaattttgaagcaaggaggaaaagcttgaagcttagtcttttagttttttctttttgattattttgttatttatctcagttatgagattaggagtgtatatgcactcgtgtagcttttgtctgtgtgtggatatagaggctggatttctatccattatcttaaataaattgtccaagaaatttatcaggggaaatgcagttagatgcaccattagaattgcttcattgcctgtggaagagtggaacagctctgagaattgtgattatgttttatatatttaaacaatattgattactagtactagatttactctctttttttttccttatgaaattccttgatactggtagtagtgagagataaacctaataattacatgccacatacctgtagattgtactatacttcaacacccttttgcaaatagtgagagataaacctaatacttacttacatgccacatcgtcagagcactcaattcttttttgttttggtaagcaatcagcttttgcctttacatagacaaaaattgatcgacgaatattttgaaaaaaaaaacctttgtatttatatggaaaagaaaatgcaaggtactttaccaaacaattgtgcatctatgatctatctgctatgtaggggttgataccggccttggttccttgctgcaccaactgttatttacctatctccatttttgttcttccagcaacaatagtatcaaaatactaaatgtctttcctgactaaggctaccttcataaatttacaggggtcattattctgctcgctatccaatccaatgcttctgaaaggtagcatggtttataagatgaaatccaagagagagatgctacagcaaagccaacagttgcccaatcagtatcatttcctttcatatatcaattcagctgtgcattattttgaggagaagcaaacaacatcatacagaaatactgacattgcaattgtcgggagggatgctgatttggatcatctcatggatcttttaatgcaaaacagcgctgaagagctttgtattatacccatagttgggcctgtaggttttggaaagacaagccttgcacagttagttttcaatgatacaagaacagaggtattcagctttaggatatgggttcatgtttccatgggtaatatcaaccttgaaaaaattgggagagatatagtttcacaaactacagaaaaaattgagggaaatatgcagctgcagtcaatcaagaatgctgttcagcgtgtgctaaataaatatagttgcttgatcataatagacagcctttggggaaaggatgaagaagtgaatgaattgaagcagatgttgcttacaggtagacacacagaaagcaagatcatagtgaccactcatagcaataaagtagctaagctgatttccaccgttccactgtacaagttggcagctttatctgaggatgattgtttaaaaatattctctcaaagggcaatgacaggtccgggtgacccgttgttcagggaatatggagaagaaatcgttagaaggtgtgaaggcacacccttggtagccaattttctcggttctgtggtgaatgctcaacgacaaaggcgtgagatttggcaagctgcaaaggatgaagaaatgtggaagatagaggaagattatccccaagacaaaatttcaccactatttccatcattcaagataatatattataatatgccccatgagctaagattatgctttgtatattgttcaatcttccctaaaggaactgttatagaaaagaagaaacttattcagcaatggattgcacttgacatgattgagtccaaacatggaaccttgccacttgatgtaactgcggagaaatatattgatgaacttaaagcaatctatttccttcaagttttagagcggtctcaggtaagttcatgggttgctttttaccttctgtacatatcctatgtaactagaatgtggttaaatatctccattaagcatagtagcttataccattgttttatttctaaattctcaataagtttctgtaagaagattgaccatgatagaatggccaatagtgatatctcaacaaacaagtaacactgttttcctccacagaatgatgcagaaagatccagtgcttctgaggaaatgcttcgcatgcataacttggctcatgatcttgctagatcggttgctggtgaagatatccttgttattttagatgccgagaatgagcgcaatgccagatattgcaattaccgttatgcacaggtgtctgcttctagtttagagtcaatcgatcgcaaggcatggccttccaaggcaaggtcactaattttcaagaatagtggtgtggactttgagcatgtcagtgaagttctttcagtgaacaaatacctgcgtgttttggatctcagtggatgttgtgttcaagatattccatctcctatctttcagctgaaacaattgagatacctcgacgtttcatctttatctattacagcactccctctgcaaattagtagctttcataagttacaaatgttggatctttcagaaactgaactaacagagttgccaccctttataagcaacttaaaaggactgaattatttgaatctccaaggttgccagaaacttcaacgattgaatagccttcatttgttgcatgatctacattacctaaacttgtcatgctgccctgaagttactagttttcctgaatctattgaaaatctgaccaaactccgtttcttgaatctttctggatgctctaagctttcaacattacctatcagatttttggaatcatttgctagcctctgttctttggtagatcttaacttaagtggctttgaattccaaatgttgcccgacttttttggcaacatatattcacttcagtatttaaatctgtcaaaatgtttgaaacttgaggtattaccacaatcttttggccaacttgcatatctgaaaagcctaaatctttcatattgttctgatcttaaactgctggaatcctttgaatgccttacctctcttcggtttttgaatctctcgaactgctctaggcttgaatatttgccatcatgctttgacaagcttaataatttagagtctctgaatttatcacaatgtcttggacttaaagcactacctgaatcacttcaaaaccttaaaaatcttcagcttgatgtttctgggtgtcaggattgtatagtacaatccttttctctaagtaccagaagttcccagtcctgccaacggtcggagaaagctgagcaggtcagatcaagaaacagtgaaatttcagagatcacttatgaggaacctgctgagattgaacttttaaagaataatccaagtaaagatttggcctccatctcacacctaaatgaggatagaattgaggagcctgaagttgtcactgaggtaaacttacattttattaaagaaataaaaacaatttgcctagtgtttcctttgaaatttccttatgtcaatacttaatttatctttgatagatttgagttactggtgattgagaaagttgtatgccaatttgaaccagtttctcactaccaactgaaaatgatgacgaacggaaactttattgtagttgtgctcgaattgaagatcccttttctaatgaggtgatctaattgggtaccagaacatgaatcatacttttttcagtagttcttaacatttcgtagagaaaatacatgagtgttccttcaattaaaaaactccctagaggccagcaagttataaatttaaatgggattctccttattacctagatttatgttttcagaaaattttgtaatatcatactaactaattgtccatgtccttgtttcttgatgtagccaagtgcaactagaggtatggtacaacagattccaggaaaccagctctcatcgccttcatctcatctttcttcctttgcatcaagctcagcgccatttgcatcctcctcttcggacacctcaacaagtgagcatccagtgcctaatgaagaggcggcaggtatggtacttcaaataattttctcccgatttaatcatctcaagatgaggttcacttctttatttgaatataccattataaggaaatagatcatgcgccctcttgtttaaaggaatttgatgtttttttatattcgctctctttgagatatacctgtcatccagcagtggtaaaaaggatagtatatagctgacaaatatgttcatataatttccttgtgggtaattttgatattctctttctatcttaatacgtgttatgagcaccggctaatgaccgaatggggtatgaatggaacaccggaggtcgaggcttttggcagcctcttcgacgtctggcccatgatcggcgacgaaagcaaaagcaggggatgagagagtagagaattggagacgagactatagattgaatcttgcttggttcattcatgatttcgtggcccttaattaggcttacgattgaactgaattagctaataaaaaaggataacaaagtcttctctaaatgtaagcaatcggatcactatcgctcgtccggcatgccgcgtcagttttcagctcgcgtgatctccttcgacgccgcttggaccggttgctgcatccgcgtagttgcgtttcttcatgtagacgattccgaccctttacattacaactacttggaattctttgagtgttctaaaataatttggatagtggtacatatgtggttacattttcttaatggtgacatatagccaagttggactaagattaattttaatttgtgtggaatgagaaagagtcaagacagtttgatacgtagaagtttgcatattcagaaccttatactggtttgtcttggtttattttcttgacaatgcagctttgacagttcctcggtccaaagagaaatgcgacaacactcccatgccggtaaaagatggcctgatatctgaagatgatgcaccggtacatctgcatcagaagcccctgcaggcgacagccatggcagccatatgactgacctgtaatcctacaagaaaccaactgaagattcatatgtggactgagtgaaattatgaaagttattggaataaattgttgctctgtatgtgagagcaagcttcagtccgttagcctggttccttttagtagtgttctactattgggagatcttcatcaacattttacatgaaacgtgatgtaatgaacctctgttaattgttaattgtcagagctctagttttttgtggtataaattttgttgcaagggggcaatgcactcaacttttgaatcatttgattggtatggaaatcattgcatttgtgcagagttcaggcagagttcagttcttgcatttgcacatcgtattactattacctggccttgtttggcacatctccagttccagctccacctctcctagagctggagctcagccaaacagtttcagctccaccgaaaatgggagcggagctgggtggagcactctaacaaaatgaactagagaggtggagctaggttaagctgttccacaactccacttcagatctaactcctaaagttaaatttaaaagttgaagctctaccaaacgagaaaacggacgatatgccactgtataggttgggttcgaatgaaatgccactcaatacaatgtatcggataaaatgccactcaatacgttgcctattggatgaaatgccac

SEQ ID NO: 407 - protein, 1388 aa, Malus x robusta
MGGEAFLVAFLQVLVDKLAHREVFKYFGLVKGVDQKLKKWSATLSAIGAVLNDAEERQLTAKNNTLKLWLEDLRDLAFDVEDVLDKYATKMLKRQIQHAHSRTTSKLWNSIPDGVFNFNMNSEIQKISERLQEISEQKDQLNLKIDTGALTTRARRNISPSSSQPDGPVIGRDEDKRKIVELLSKQEHRTVNFDVVAIVGMAGVGKTTLAGQVLNDMVATQTFQPAVWACVSDDFNLERVTKQILESITSRQCTTEDYNKVQDYLHKELAGKKFLIVLDDVWKTCSYGEWMKLQSPFRDGAQGSKIIVTTRDTDVSKMMGAATLVHNLEPMESSVCLQVFEQHAFLNSNDDKPPNYELLKEKIAAKCRGLPLAARTLGGVLLRKDTYEWEDILNNKLWSLSNEHDILPVLRLTYFYLPSHLKRCFAYCSILPNDYEFEEKQMILLWMAEGFILPRPEDKKQIEDLGADYFRDLVSRSLFQKSTKCISKYVMHDLIGDLARWAAGEICFRLEDKQNDDGEQLRCFPKARHSSYIRGLSDGVKRFEVFSELKYLRTFLPLRKDSFWNYLSRQVAFDLLPKLQYLRVLSFNCYKITELPDSIGDLRYLRYLDLSYTDITSLPKSTSTLYNLQTLILEGCSKLKALPIDMSNLVNLRHLNNSNVSLLEDMPPQLGRLVNLQSLTKFVVSGGGGGDRSGIRELEFLMHLRGTLCISRLENVTDVEDAQRANLNCKERLDSLVLEWSHSSDTRETESAVLDMLQPHTKLKELTIKSYAGKEFSSWVGVPLFSNMVLVRLEECNNCLSLPPLGKLPHLKELYIRGMNAVESVGAEFYGECSLPFPLLETLEFVDMQHWKVWLPFQTDHRGSVFPCLKTLLVRKCSKLEGKLPENLDSLASLEIVKCEELLVSIANYKQLRQLNIDGCKGVVHTAAKVEFELLESLYLSNISELTSLQTGELCRNGLNMVRDLKINGCEELTSSLKNEAILLQQLISLGRLEIEDNSLLVEELGKEADELLQLQILGCKLEFLKLKKCKNLLKLPEGLNQLSSLQELRIHECSSLVSFPDVGLPPSLKDIEITECHSLIYFAKSQIPQNLRRIQIRDCRSLRSLVDNEAVGSCSSSSHNCLEYLNIERCQSLTLLSLSDQLVRALRELDIYDCEQLEFLAPDGLFCNNTNYFLENFRIRRCQNLKSLPRLSGGIRGSNLREIRITDCDRLEALPEDMHNFNSLEKLIIDYREGLTCSFPANLTSLMIWKVKSCKSLWELEWGLHRLTSLRYLWIGGEDPDMVSFPPDMVRMETLLPKSLTELSIGGFPNLKKLSSKGFQFLTSLESLELWDCPKLASIPKEGLPLSLTELCIYGCPVLKERCQPGKGRYWHKISHIPYIDIDWKMI

SEQ ID NO: 408 - protein, 16 aa, synthetic construct
MWVLCLFCWPTYTHGS

SEQ ID NO: 409 - protein, 6 aa, synthetic construct
MHMYLK

SEQ ID NO: 410 - protein, 10 aa, synthetic construct
MSYKLHVVPW

SEQ ID NO: 411 - protein, 7 aa, synthetic construct
MSATPQV

SEQ ID NO: 412 - protein, 8 aa, synthetic construct
MRKHNWHI

SEQ ID NO: 413 - protein, 29 aa, synthetic construct
MRKHLQHTYILSFSLSLSLIPAQLCGRRE

SEQ ID NO: 414 - DNA, 66 bp, Dichanthelium oligosanthes
  source 1..66: mol_type = genomic DNA
aatttaactccgcctatgttgtctcaacatagccggtcccaagcccggataaaggaggagggggtt

SEQ ID NO: 415 - DNA, 61 bp, Solanum lycopersicum
  source 1..61: mol_type = genomic DNA
cttgtaactccgcctgtcaagtcacagccggtcccaagcccggaaaaaggaggagggcaag

SEQ ID NO: 416 - DNA, 52 bp, Sorghum bicolor
  source 1..52: mol_type = genomic DNA
tgcttaacactgccaatgccggtcccaagcccggataaaagtggagggggca

SEQ ID NO: 417 - DNA, 52 bp, Sorghum bicolor
  source 1..52: mol_type = genomic DNA
tgcctaacactgccaatgccggtcccaagcccggatagaagtggagggggca

SEQ ID NO: 418 - DNA, 52 bp, Sorghum bicolor
  source 1..52: mol_type = genomic DNA
tgcctaacactgccaatgccggtcccaagcccggataaaagtggagggggca

SEQ ID NO: 419 - DNA, 80 bp, Oryza sativa
  source 1..80: mol_type = genomic DNA
tatgtaactccgcctatgtcatcttaagtttatctaaatgatatagccggtcccaagcccggaaaaaggaggagggtata

SEQ ID NO: 420 - DNA, 43 bp, synthetic construct
  source 1..43: mol_type = other DNA
nnnnnnctgatgagtccgtgaggacgaaacgagtaagctcgtc

SEQ ID NO: 421 - DNA, 59 bp, synthetic construct
  source 1..59: mol_type = other DNA
acttgtccacaatcttttctgatgagtcgctgaaatgcgacgaaactcgatatgttcaa

SEQ ID NO: 422 - DNA, 171 bp, Bacillus subtilis
  source 1..171: mol_type = genomic DNA
cctataattatagcgcccgaactaagcgcccgaaaaaaggcttagttgacgaggatggaggttatcgaattttcggcggatgcctcccggctgattatgcagatcacagccgtaaggatttcttcaaaccaagggggtaactccttgaacaaagagaaatcacatgatctt

SEQ ID NO: 423 - DNA, 68 bp, Hepatitis delta virus
  source 1..68: mol_type = other DNA
ggccggcatggtcccagcctcctcgctggcgccggctgggcaacatgcttcggcatggcgaatgggac

SEQ ID NO: 424 - DNA, 186 bp, Otolemur garnettii
  source 1..186: mol_type = genomic DNA
ggcgctgtgtcgcaatctgcgaagggcgtcgtcggcccaagcggtagtaagcagggaactcacctccaatgaaacacattgtcgtagcagttgactactgttatgtgattggtagaggctaagtgacggtattggcgtaagccaataccgcagcacagcacaagcccgcttgcgagattacagcgc

SEQ ID NO: 425 - DNA, 52 bp, Chicory yellow mottle virus
  source 1..52: mol_type = other DNA
caacagcgaagcgcgccagggaaacacaccatgtgtggtatattatctggca

SEQ ID NO: 426 - DNA, 52 bp, Arabis mosaic virus
  source 1..52: mol_type = other DNA
caacagcgaagcggaacggcgaaacacaccttgtgtggtatattacccgttg

SEQ ID NO: 427 - DNA, 50 bp, Tobacco ringspot virus
  source 1..50: mol_type = other DNA
aaacagagaagtcaaccagagaaacacacgttgtggtatattacctggta

SEQ ID NO: 428 - DNA, 52 bp, Chicory yellow mottle virus; identical to SEQ ID NO: 425
  source 1..52: mol_type = other DNA

SEQ ID NO: 429 - DNA, 52 bp, Chicory yellow mottle virus; identical to SEQ ID NO: 425
  source 1..52: mol_type = other DNA

SEQ ID NO: 430 - DNA, 50 bp, Tobacco ringspot virus; identical to SEQ ID NO: 427
  source 1..50: mol_type = other DNA

SEQ ID NO: 431 - DNA, 68 bp, synthetic construct
  source 1..68: mol_type = other DNA
ggagagagaagtcaaccagagaaacacaccaacccattgcactccgggttggtggtatattacctggt

SEQ ID NO: 432 - DNA, 526 bp, Oryza sativa
  source 1..526: mol_type = genomic DNA
ctacggacttgattgtattgagccttggtatggaaacctgctaagtggcaacttccaaattcagagaaaccctggaattaaaaaaggggcaatcctgagccaaatccatgttttgagaaaacaagcggttctcgaactagaacccaaaggaaaaggataggtgcagagactcaatggaagctgttctaacgaatcgagttaattacgttgtgttgctagcggaactcccttctaaattagggaaagaagggctttcgaaatctaatacacacgtatagatactggcatagcaaacgattaatcacagaactcatatcataatataggttctttaattcttttttaaaatgaaaataggaatgattatgaaatagaaaattcataatttttttagaattgttgtgaatccattccaatcgaatattgagtaatcaaatccttcaattcatagttttcgaaatctttttaaaagcggattaatcggacgaggataaagagagagtcccattctacatgtcaatactga

SEQ ID NO: 433 - DNA, 526 bp, Oryza glaberrima; identical to SEQ ID NO: 432
  source 1..526: mol_type = genomic DNA

SEQ ID NO: 434 - DNA, 74 bp, Nicotiana sylvestris
  source 1..74: mol_type = genomic DNA
gaaagtcgtattcgatgaaagtcgtatgtacggcttggagggagatctttcatatatttcgagatccagcctac

SEQ ID NO: 435 - DNA, 130 bp, Solanum lycopersicum
  source 1..130: mol_type = genomic DNA
gagagccgtgtgatgggtgactatccagcacggttaagagagcacttttagtctgctctggtgaatggaagccccctatcatgcaataaggaagcagctcttctcacagcggagtcaccgttgactttat

SEQ ID NO: 436 - DNA, 77 bp, Hordeum vulgare
  source 1..77: mol_type = genomic DNA
gaaagccgtatgctttggaagaagcttgtacagtttgggaaggggttttttgagagaaaagaagaatctacttcaac

SEQ ID NO: 437 - DNA, 79 bp, Hordeum vulgare
  source 1..79: mol_type = genomic DNA
aggagctggatgagaagaaactctcatgtccagttttcgagtagagatggaactaagaaagagaaccatcgactataac

SEQ ID NO: 438 - DNA, 79 bp, Capsicum annuum
  source 1..79: mol_type = genomic DNA
aggagccgtgtgagatgaaagtctcatgcacggttttgaatgagagaaagaagtgaggaatcctcttttcgactctgac

SEQ ID NO: 439 - RNA, 43 nt, synthetic construct
  source 1..43: mol_type = other RNA
ccaatcgtggcgtgtcggcctgcttcggcaggcactggcgccg

SEQ ID NO: 440 - RNA, 49 nt, synthetic construct
  source 1..49: mol_type = other RNA
gagacggtcgggtccagatattcgtatctgtcgagtagagtgtgggctc

SEQ ID NO: 441 - RNA, 132 nt, synthetic construct
  source 1..132: mol_type = other RNA
gtgctcgcttcggcagcacatatactagtcgaccgccagatgccttgtaaccgaaagggggaagaggaaggaggtctgaggaggtcactttcccgaaaggatggcgtctagagcggacttcggtccgctttt

SEQ ID NO: 442 - RNA, 40 nt, synthetic construct
  source 1..40: mol_type = other RNA
ggcacgtacgaagggacggtgcggagaggagagtacgtgc

SEQ ID NO: 443 - RNA, 41 nt, synthetic construct
  source 1..41: mol_type = other RNA
ggcacgtacgaaggagaggagaggaagaggagagtacgtgc

SEQ ID NO: 444 - RNA, 46 nt, synthetic construct
  source 1..46: mol_type = other RNA
ggcacgtacgaaggaaggattggtatgtggtatattcgtacgtgcc

SEQ ID NO: 445 - RNA, 45 nt, synthetic construct
  source 1..45: mol_type = other RNA
ggcacgtacgaaggaaggtttggtatgtggtatattcgtacgtgc

SEQ ID NO: 446 - RNA, 42 nt, synthetic construct
  source 1..42: mol_type = other RNA
ggcacgtaccgagggagtggtgaggatgaggcgagtacgtgc

SEQ ID NO: 447 - RNA, 83 nt, synthetic construct
  source 1..83: mol_type = other RNA
gggaagatacaaggtgagcccaataatatggtttgggttaggataggaagtagagccttaaactctctaagcggtatcttccc

SEQ ID NO: 448 - RNA, 52 nt, synthetic construct
  source 1..52: mol_type = other RNA
ggctagctggaggggcgccagttcgctggtggttgggtgcggtcggctagcc

SEQ ID NO: 449 - RNA, 98 nt, synthetic construct
  source 1..98: mol_type = other RNA
gacgcaactgaatgaaatggtgaaggacgggtccaggtgtggctgcttcggcagtgcagcttgttgagtagagtgtgagctccgtaactagtcgcgtc

SEQ ID NO: 450 - RNA, 95 nt, synthetic construct
  source 1..95: mol_type = other RNA
gatgtaactgaatgaaatggtgaaggacgggtccagtaggctgcttcggcagcctacttgttgagtagagtgtgagctccgtaactagttacatc

SEQ ID NO: 451 - RNA, 100 nt, synthetic construct
  source 1..100: mol_type = other RNA
ggagacgcaactgaatgaaatggtgaaggagacggtcgggtccaggtgcacaaatgtggcctgttgagtagcgtgtgggctccgtaactagtcgcgtcac

SEQ ID NO: 452 - RNA, 57 nt, synthetic construct
  source 1..57: mol_type = other RNA
ggatgcgccttgaaaagcctgcttcggcagctggtgaatgacagctatggcgcatcc

SEQ ID NO: 453 - DNA, 44 bp, Pea early-browning virus
  source 1..44: mol_type = other DNA
attcaattaattcaatagaattaattctcgtattaatatgacaa

SEQ ID NO: 454 - DNA, 45 bp, Tobacco rattle virus
  source 1..45: mol_type = other DNA
attttatcactcttataagagtgatactcgtattaatatgaccaa

SEQ ID NO: 455 - DNA, 45 bp, Tobacco rattle virus
  source 1..45: mol_type = other DNA
attcaaagattacaatagtaatctctaccgtatttatttgacaaa

SEQ ID NO: 456 - DNA, 45 bp, Tobacco rattle virus; identical to SEQ ID NO: 455
  source 1..45: mol_type = other DNA

SEQ ID NO: 457 - DNA, 45 bp, Tobacco rattle virus
  source 1..45: mol_type = other DNA
attcggtagtgtgaaaacacattacctacgtattaatatgactaa

SEQ ID NO: 458 - DNA, 38 bp, Pea early-browning virus
  source 1..38: mol_type = other DNA
ttatggtctaagataattcttcagaccctcgtaatttt

SEQ ID NO: 459 - DNA, 38 bp, Pea early-browning virus
  source 1..38: mol_type = other DNA
cttaacaagaatcttatcaagattctgttcgtattcta

SEQ ID NO: 460 - DNA, 38 bp, Pea early-browning virus
  source 1..38: mol_type = other DNA
caaggtatatgcgaaacacgcgtaataccttcgtataa

SEQ ID NO: 461 - DNA, 211 bp, Tobacco mosaic virus
  source 1..211: mol_type = other DNA
gaaaaaagagtgatgtccgcaaagggaaaaatagtagtaatgatcggtcagtgccgaacaagaactatagaaatgttaaggattttggaggaatgagttttaaaaagaataatttaatcgatgatgattcggaggctactgtcgccgaatcggattcgttttaaatatgtcttacagtatcactactccatctcagttcgtgttcttgtca

SEQ ID NO: 462 - DNA, 135 bp, Tobacco mosaic virus
  source 1..135: mol_type = other DNA
ctttgtgatgttgctgtttcgttgaacaattgtgcgtattacacacagttggacgacgctgtatgggaggttcataagaccgcccctccaggttcgtttgtttataaaagtctggtgaagtatttgtctgataaa

SEQ ID NO: 463 - DNA, 43 bp, Cucumber mosaic virus
  source 1..43: mol_type = other DNA
ttctcatggatgcttctccgcgagattgcgttattgtctactg

SEQ ID NO: 464 - protein, 10 aa, synthetic construct
  VARIANT 2: note = X is R, G, or F
  VARIANT 3: note = X is Y or G
  VARIANT 4: note = X is A or F
  VARIANT 5: note = X is Y or V
  VARIANT 8: note = X is any amino acid
KXXXXILXFY

SEQ ID NO: 465 - protein, 9 aa, synthetic construct
  VARIANT 3: note = X is L or F
  VARIANT 4: note = X is Y or I
  VARIANT 7: note = X is any amino acid
IVXXVLXNL

SEQ ID NO: 466 - DNA, 82 bp, Nicotiana tabacum
  source 1..82: mol_type = genomic DNA
agacgcatccatggctgaatggttaaagcgcccaactcataattggcgaattcgtaggttcaattcctactggatgcaaaga

SEQ ID NO: 467 - DNA, 126 bp, synthetic construct
  source 1..126: mol_type = other DNA
gattattatactatcaaagatttttctaatctgtctagtatcaaaatagattaagaatttacattcctctaacttatcaagtttttaccctactccatagttctctaacttgccctttccttacaa

SEQ ID NO: 468 - DNA, 499 bp, White clover cryptic virus 1
  source 1..499: mol_type = other DNA
gttttaacttaagcttttcgtaatcaaaatagaacgcgaatctcaactgctctacctcaactttttacctactctaccgctaacttaccgccctacccacaagatgaatcaagacactcctctcgccaatctcaatggccccgaagttccatccggcaacgtccctcccgccaaccctcctggtcgaacaaacgtcgcccctcccgcccaaggtgctgttcaacagcctcctgctccggctgctcgtcgtgcccgcaacccacacggccctgtccctcctgctggaccatcccgttctgctggtgcccctgctatgcttgaactttccgctgcctaccctatgtacaccgaacaacgtcgtgcacccaactactatgtgcctgacgcacaacttctcttccacaccctcggtgtctgcgaccaactgatgaccacaactgaccgcttcctccgctccatgccttcatggttgccaatcgtctctcagctttacgtctct

SEQ ID NO: 469 - DNA, 500 bp, Vicia cryptic virus
  source 1..500: mol_type = other DNA
gatcaaaagagtaacagtccttgtaccaacttttcacaatcaaaatagaacgcgaatcttgactgctctacctcaactttttacttactttaacgttgtttatcaaccgtccctctcaatggaagctcatactcccgctgctgatgtcaatggacccaatatcccctccggtgctgtctctcagccagaaatcgctccacacaatcaagctgcccccaacgtctctggtgctgctcaggctataatagcccccacccctgctcgtaagcgcacgcctcacggacccattcctgctgccacctcatctggcaacacctctgctcctgctctcctggaattagctgctgcttatcccatgtacaccgagcaacgccgttcattcaactttttcatcccagactcccaaatgatgtttcactctttaggtatctgcgactcaatgatgaactccaccgatcgttttcttcgatcctcacccgcttggctccccatcgtttcac

SEQ ID NO: 470 - DNA, 500 bp, unidentified
  source 1..500: mol_type = other DNA
agaaaaattttagaacctactctaattgatttttctaagctttatttcttttcctctgaaaaccaactttcaacataatggctcatcgtactcccactaatgccccggctcttcctcaagttgatgggatcaaccccaaccttccccccaacgacccaggaaccgtcgccgccgcccctaatgctaggaacttgcatctcgaaagagaacaagaagctagacaagaccgcgccgccgccgccttcgtccccaacactcgctttgcggtgagaagaccgacgattcgcccctccccggcccactctgcccctgacctagagactgctctctttgattcagccgtcaaccacccccccaccccggtctcctatccgtctacctcatcctacatccccaacttcacttccgccttctactatctcaacaagatggactccttgatggtccaaactctcaactggacaaacaactgctctggatgggttcccccatactcccag

SEQ ID NO: 471 - DNA, 500 bp, unidentified
  source 1..500: mol_type = other DNA
gataatgatcctgggaaagatcgttattattttactagtgtaaatttcttaaagagcttttcttcaaggtaattttcactttctcactttccccttagatgttatctaagcttgccttgttataataatttataactctactagtatgtttactatcttactttcgtagatatggctagcccacgtgactctatgatgacgactgctcaagacgctaagaaacgtaaagtttctcatattttgagtccgattcgaatgatcgagcctgctgctcaatccctcgcaatcatcccagttgtccctcaagtccaaatggatgacgctgaagctatggctgaattgctgtatcgtgaacgcgcccgcattgaacttgatattaatcctgcttatatcagtagattggaatcccgtcgagagattggtttctatcctcctgttgcaagtaagaacgttccgttcactactttcaacatcgatgtcgctgaattcagacgctgcat

SEQ ID NO: 472 - DNA, 500 bp, unidentified
  source 1..500: mol_type = other DNA
gataatgatccaccgaaaggtaatcattgtctctttagttaggaattaaacttcaaatttcatttaaacttatgaacctacttagaagtttcttcccctatcttactaaagacctgtttgtttgatatgtttcagtgagtacctaaactcatacatcttacatccgctactaacgagcaatcaccatcccatggcgactgacaatagcgacgctaagactgagcaatcaaaagtcacggagagcaaaggttcttcaccaacgaagagcttacccgctcatgctgctgacgagaaagccgctgttggtgctaccttcaagctgcaatccagacaacccactgagccacccgctataccaagcgtattcgctcaatcacaatcacttaatgattctgtgggaaacccagactttatagcgcaactgcgagatgaaggcatgtacggcctgtttctgccaagagatcgagcccgtcgcacgcctacaccagtaactctgcggc

SEQ ID NO: 473 - DNA, 500 bp, unidentified
  source 1..500: mol_type = other DNA
gataatgtttcattaggaaacattatcccggattagccggtagcttttgtgtatagatttatgttaggaaacatgtctttgtctcactgaccacacaagtataccactaaccaagtttctttattgtttcaggattaattaaccagtgaattattcaccttacaatcgccgctaaccaagcacattaccactttgtgatcaaccgacgatggcttttgaatccaaaacatccgcttccgaaagcactgtgaacaaagatgcagctcccgctccgtcctccgcaagtgtcaaatctccagtcaagccctccagctctggactcggccgcgccaaaacagaaacgccccacctcccggcatctaactatgagatcccgcgttacacacgcgatactcagccggttgttggaaacaagaattacgaattctctctccgcatggatggacgccttggccactcgatggaccgctccaaaacggcccgccctgaagtcaactgct

SEQ ID NO: 474 - DNA, 500 bp, unidentified
  source 1..500: mol_type = other DNA
gataatgatcgtttatcgatcattatcataggttaggtctagaggtctagatagattagctttaggttagtcataacgactctctagtacacacactaaccaacttgtgtttttacattgcaggtttaatttcgtgaattaacgtaaagctttttcacccttacctcgcgatggatacagcacaaacagacgctgacaaagctgctggaaaacgtggagcaactgtgccgcccgaaggtgagcccgctgcaaaaaccatgagattttccgacgctattgtcccagctggtccgagcaaggatgcttctactgttgcaaccgccgccctgcccaaagatcttatacagtggccgattgaacggctagctacacaggtcaaccaagtctttctcgacaccaccatccagaatggagaaggtggatatgaagtccctgacgatcaaatcgtcccaacacttcgtgtttacgagatcaacgtgaccaatctgcggaacgctttt

SEQ ID NO: 475 - DNA, 500 bp, unidentified
  source 1..500: mol_type = other DNA
gataatgatccaccgaaaaggttcattatctctttagttaggatttaacttctaagtttcacttcatacttataaacttactaagaagttgctatacatcctacactaacgaattcctgtttgatttgtttcagtgagtaactaaactcatacatcttacgaccgtagctaacgagcctacccaacaccatggataaggatgctgccgccgcccagactgagcaatcaaagattacggagagccacggatcttcacctgagaagaatgccgccgctcacactgctgatcagaaagccgctgttggatcaacctttcagctgcaatcccggaagcccacagagccacccactgtaccaagtgcgttcgctcaatctacggcacttaatgtgtctgtgggtaatgcagactatatagctgaacaaagagatgaaggaaaatatggcttgtttctaccaagagatagagcccaccgtgaacccgaacctgtcaccatgatagt

SEQ ID NO: 476 - DNA, 499 bp, unidentified
  source 1..499: mol_type = other DNA
gataatgatccagggaaagatcattattatctttaagtgattaactttctgtaaaatctacattacaggtaattattcactccctaccttccccgtagttctgtacgaagcttagcgttttataaaattttataaagctatctgcattttaactatcctagttccgcaggtatggctagctccaaacgaactccgccgcttgttgcacaacaaccgaagaaacgccgtttcgaaacggtcttcgatcttggacccagcttaggatctacatccctcgctatggtacatgtgccacaaccgactccaatgctaacggatgaagctgaacaaatggctgaattgctatttcgcgaacgctcccgaattgaattggatattaatcctgcttatgtcagtgaactcgaacttcgtcgtgaagtcggattttctccgatgatcgctaataaaactttagctttcactacttacgacctacgagtcgttgaattcagacgctgca

SEQ ID NO: 477 - DNA, 500 bp, Beet cryptic virus 1
  source 1..500: mol_type = other DNA
gatcaaaagatcaacagctcttgttcaaagctttctgtaatcaaaatagaacacagatctcagctgctctgactcaacttgttacctactctaagatactcaatatcgcccctctcgataagatggaaaacaacactcctctggctaaccctagcggccccaatgtaccctccgctgctgccccccccacccccgcccctccggcgatacctcaggctacccccactcccggtgctgtctctcagccccctgcccctcctgcccgccgaagccgtactccgcgtggccctgttccccaggctactcctggctccacttctggtgcccctgctttgctggaactctcagccggccttcctatgtacactgtgccccgtcgcggtgttaacacctttgtccctgatgctcagatgctattccatgtccttggaatctgtgatcaaatgatgctttcaactgatcgctttacgcgttcatctcctgcttggatccccatcgtc

SEQ ID NO: 478 - DNA, 500 bp, unidentified
  source 1..500: mol_type = other DNA
agaatttcctactgtgccacattattgtatacagttgaaatttaactctaatttttacacccgctctttgcactcttatattccacccctaccatggaaaacggagcaaataatcctccagctgccggcgccattgtcgcagcagtgcaacctgcactccccccgggtctcgacgcttcgaagcttaatcgtgctactgaatatctgtacgatgctgacaagatcagaccccatcgagctagatcaccaaagtaccgtcgctacatgcagctcaagaagaacgaaatctacgttcagctcatcgacatctatcgtgcatctttctctgtcacttggcctgattttcgccatttgattcatgctttcccgcccccggctaaccatgaaccccaaacgtactacgcttgctgctatatctccggatggtttcgtgatttatactaccatatccgtaaagctcttaagagcctttctggactggctgaactcgaatattatcg

SEQ ID NO: 479 - DNA, 500 bp, Primula malacoides virus 1
  source 1..500: mol_type = other DNA
gatttttttaaaccggccccccgcttaaaaatttagaatttacattcgtctacaaaatcaagttcttacaaaacccctgctctttttataacaatgtctgataccgtccttcaagctaagactaacttccttaagaataagtcacctgtccttagtgtccaagaaagcaaacgacctaaaatctcacgcgacctaatgccacttttccaaagtaacactgctgctcgctctgactcatccaaccaatggactattgatgtctttccaaacatggttcctattactatgtatatcatgctcacctcaattgctcacgccaatgatgttgaccaccgcactacctccaaagtgtccgttgcaactatttgcatgtaccatctctccatcgtctacggttatttccttctcaatgacatgattactcgtgcctccgcttctgctcatgcccgcccctggattgaaacttcctggaaacgcgaattcgccgactttttgctcac

SEQ ID NO: 480 - DNA, 500 bp, Fig cryptic virus
  source 1..500: mol_type = other DNA
ggattgcttccaccgttgcttatagcatcgatcacatcgttcaaaggctgacggtcatcgtggttagaggaaactcgcagcccagactagactcctacgaagtgctaacgttacggcatccgcctaacggtaggcagcgatccacaccactgctctcttgtcaagttttacatcactacaatggcagcacccaatttcgacattcttgaagacctcattgctgatgggcgcctccaaattaccccttatgtcacctcaactgaacccaaaatatttgacgtcgatttcgacgcactctggaacaggattaacgctattatagttccaatttacactaattgggatcaactcaggtttcattatcccggaacaactactactgtgacaaacaacatcacccttgacgttggacacctagtcacatttgcgctctggcaactttataacagactccgatctgttgctgaatgcttccaccacccaacgcgtacctcgcgaat

SEQ ID NO: 481 - DNA, 500 bp, unidentified
  source 1..500: mol_type = other DNA
agaatttcctccaaacactagaaattcgtgttttgaggcaattaaaccattaattccaatggcagaccaaggtaataatgagactcctctaccagtccaggcaacccaaccagccgcaaacagcgatcgtataccgatcacgaccctccctgcccccaggtcacaagcccccaataaacctgaatacgcacggattgcagactccctggaagacgaatatcaaatcggattccaacggatcaatccacgacttcaccgtcgttacgttatcctcaggtcacaagagctccacgaccgattgtgcaacttgtatgcaccttattttcaagctggatatcgtgttttcaaacacgttatcgaagcttacccactaccagcgggatacgctagtcaaatagcatatgccactgcgtgttacgtgtcttcgtggtgctgggatctttacgtctcgatccgagaatcagttaagaagctatcacaaacagcgttcctccaacaat

SEQ ID NO: 482 - DNA, 500 bp, White clover cryptic virus 2
  source 1..500: mol_type = other DNA
agattattcttaatcggcccccgaaagaatttaagaattcacattcgtctatattatcaagtttttacacaacctctgctctaattccaagatgtctcctgatgagaaccccactctcaacaagacccctaagaaccaaactgttgaactcgtttttcaagataccaaagttcccgttccctctgataacttcatggaatcaatccgctctaacgctgctgctcacactgacactgctaatcagtggatcattgatgttttcccaaacatgactccaatacttctgtacgttatgcattatactcacttatatgctcaagctactgaatatcgcattcatgccaaatcatctgtttacactttgtgtatgtatttcatgactattgtctatggatacttcttgctgaatgatatctacacccgccctgcgcggtctgttcatgcccgtatttggattgaatcttcctggagatctgaatttgtcaaatttctgacgactc

SEQ ID NO: 483 - DNA, 500 bp, Red clover cryptic virus 2
  source 1..500: mol_type = other DNA
agatttttcttaagcgccccgcctcaagaaattaagaattcacattcgtctaaattatcaagttctcacacaacctctgctctaataattaagatgtctactgaagagacccttcctcctactaagactattaagaaccaaaatgttaacctcattttccaagacaccaaagttcctatcccttctgataactttatggaattgctccgctctaatgctgctgctcacactgatacctcaaatctatgggttattgatgtactccctaactttaccccaattctgatgtttattatgcattacgctcatatccatgctcaagctgccgattatcgcgttcatgctaagtcatctgcttacactttgtgtatgtactatatgactgtcgtctatggctacttcttgctcaatgatctacacactcgtcctacccggtctgttcatgcccgtgtttgggttgaatcatcctggagatctgattttgttaagttcctgactac

SEQ ID NO: 484 - DNA, 500 bp, Hop trefoil cryptic virus 2
  source 1..500: mol_type = other DNA
agatttttctaaagcggccccgctagaaattaagaattcacattcgtctacattatcaagttttcctgaacctctgctctaatccttaagatgtctactgaagaaactgctcctcagactaaggcaatcaagaaccaaaatgttgtcctctcctttgaagatggaaaaccacctggtcccgtctctgacttcatgtctttgttccgctcaaactcttgtgcacacactgatactgctaatcaatggatcattgatgttttccctaacatgactcccattctcatgtacgtcatgaccaaagcccaacaccattctgaagctactgactatcgtctccactccaagtcatctgtcttcaccatctgtatgtactacatgtccatcatttatggctacttcttgttgaatgatttacattcccgccccactcaatctgcccatgctcgcaactgggttgagaactcttggaaatcctcctttgctaagttccttatgacact

SEQ ID NO: 485 - DNA, 500 bp, Dill cryptic virus 2
  source 1..500: mol_type = other DNA
agattttattaaagcgccccgaactttagtaattaagaactcacattcgtctaaattatcaagctataacaaagcccctgctctaatataatacgatgtcttctacatccctcacatcccgtctcaatgccctcaagactaagacaatgaacctcacctttactgatgtcaaagcccctgtaccctctgctgatatccttgaactcttccgtgccaacactggtgctagagccgattcctgcaatgactggacaatcgatgttttcccaaacatgactccaatcatgatgtacactatgctgatgtccattcgacatgccaatgctactcaacagcgcgaacattccaaagcttccgttgctactatctgcatgcatcacatggccgttatctatggcttcttcctcgtcaatgaccttcatgtccgtcctgctccgtctgctcacgcccgctcttgggctgaaacctcctggaaagatgactttgtcaattttcttatg

SEQ ID NO: 486 - DNA, 500 bp, unidentified
  source 1..500: mol_type = other DNA
gatcaaaagatcaacagccttccaacgctttttgcaatcaaaatagaacgcgaatctccgctgctctgactcaacttgttacctactctaccgttaccacaaccgcaaccccgaaatcatggaccccaacgtccctattgctcaacccaatggccccgctatcccaaacgttgccgctgccgctgctaaccctcctccaccgattcaaccggcccctcccgccccaggtgctgtccaacaagcccctgcccctgctccccgccgcaatcgcttaccccacggtcctgtgcccacatcttcccgcaccgccgtaacctccgctcctgctttgctcgagctcgctgccgcaactcctatgtacacggaacaacgccgtgctacaaacttctttgtccctgactctcagatgctcttccatgtgctgagtatttgtgaccaaatgatgaactctactgaacgatttcttcgttcttctcctgcctggatgcccattgtctcac

SEQ ID NO: 487 - DNA, 500 bp, unidentified
  source 1..500: mol_type = other DNA
caactgctctacctcaactttttacttactctaccgctttaacaagccgctcgataaccatgaatcacaacactcctcctgctgacgccaatggccctgcccttcctgaaggctccgtccctccccctaaccctcctactcacatccctgtagcccctgctgctcctggcgccgtccaaacgccgcctgctccccctgcccgtcgcaatcgccaaccccatggccctgtgcccgctgccagcaaccaccatgctcctggagctcctgctctcctcgaactctccgctgcctacccgatgtatactgaacaacgtcgtggtgttaacttctttgtccctgactcccaaatgctctttcacgttttgggtatgtgtgaccaaatgatgaactctactgaccgatttcttaggtcctcccctgcttggctccctatcgtctcccagctttacatagctgttctctggaatgttatgatctgccgtgtttacataaacactggc

SEQ ID NO: 488 - DNA, 500 bp, unidentified
  source 1..500: mol_type = other DNA
agaattttatcctgactactattttcagccaggttaagatactaatcttttcatacactacgctcaaagtgcaattaccgtcatcttacaatgacaactggtgatcgtgtaacacctactgacggcattacaaccgtcgatgcacccacagcaactctcgaggctaagcttgactcttcgtctaccgcttacctcaaaagcgcgaccgactttctcactcagagtagtcggattggtaccttgaggaccagctacaaggaccgccgtagatacgtctacttaaagtcccaagctatgtttgactcccttgtcgagttatactctcttctctttaccacccagtggcaagttttccgcaggtttactgatattttcgttcctcctgccaacgttactgccacccgctacctagccatgaactacatctctatgtggattcaggatacgtatgcgatgaaccgcgctgccctcatgaaattatcggtggtagctttaaatga

SEQ ID NO: 489 - DNA, 500 bp, unidentified
  source 1..500: mol_type = other DNA
gaaattactaccaatttcaaattcccacgttataattaacccaacagatattctgttcccttatatagctccccactcaccacaacaacttgtctacttacaatgtcgatgaaaagaaagtcaaggcctagttcttcaacaaaagatttagaggtagaagacacctatctcaaacaatctggacttgattcaatgaataagctcgaaccagtcgagcaatcaaaagacgaagagactaccaaagtctccatgctccccaccgcttctactgctataatcgccccgcgtaaactaactgcggaagattttagctctaaacgtaagccggatcaaacgtccgctgttagcccattctttgggttccttaggacccacatcctacaccctacacagggcaggctctcacactactacccttcctgccacatgatggactacattcttcactctatcaattcaactctctgtgataattactacttcaagagagaaactccaaa

SEQ ID NO: 490 - DNA, 500 bp, Cannabis cryptic virus
  source 1..500: mol_type = other DNA
agatttttctaaagcgccccgcctttagttattgagaatttacattcgtctatattatcaagtcctcgaaaaacctctgctctaattttaagatgtcttcctcaaccatcacttcccgtctcgatgccctcaaaagcaagaacgtgataattgaattcaaagaagcgaaaactcctgtcccctctgctgacattttgcaactctttgctgacaacaccgccgcccgctctgactcatccaatgaatggattattgatgttttcccaaacttcactcccatcctgatgtacattatgctcaatgcgattcgccacgcgaacgccactgctcaacgtgaacattccaagtcatctgttgccaccatttgcatgtatcatctgtccattgtctatggatttttcctcatcaatgacctcaatgtccgtcctgctccgtctgctcatgcccgtatctgggccgaatccaactggagatctgaatttgtgaaatttctgtccacc

SEQ ID NO: 491 - DNA, 500 bp, unidentified
  source 1..500: mol_type = other DNA
gattaacagccttcataacgctttttgcaatcaaaatagaacgcaaatctcagctgctctaactcaactttttacttactctactgcttacccaagccgcccacaccacaatgaatcctgaaacaccacttgccgaccccaacggtcccaccccacctcacggtgctgctgcccaacccacccctggccaacacatccctgctggaactccctccactggtgctgtccacttgacaccagccccgcaacccaagcgcaaccgcgcgccccgtggcccgttcgacaatgcctcgagcacctctgctcctggagctcctgctttactggagcttgctgctgcctaccccatgtccacggaacaaaggcgttccccaaacaccttcgtccctgacgcccagatgcttttccatgtcctcagcttatgcgacaacatgatgctgtctaccgaccgtttcacccgctctgctcccgcctggctccccatcgtctcgcagctttac

SEQ ID NO: 492 - DNA, 500 bp, Pepper cryptic virus 2
  source 1..500: mol_type = other DNA
agaattttctgatcacagtatcgagagatcactgtgaccaaagaaagttattaaaatttaacctaagacgtttataatatggcgacaccagttagtgacacaccaactactaagtctacacaagacaagactgaccaattaccggcagctacgccccctataacgcaaaagccaccctcctacaaatccgagatttcaagaatcgccgactacctcgccgatgactacgaaattggatacgtaagagaccgtccacccaagcatagaagatatgctgtgttaaggacgcaagctttattcaacaaacttatcgaaatctacggtaagttatttaaacagaactgggaattcctccgacgttcaatcgacggtttcacaaccgcagttggcattcgtgagagacaatgggaaaacgcagcccacgcgtatatctcatgctggttctttgacctttacgtttctgtcagaaacgctgttgaaaaggtctcaggtactgcatt

SEQ ID NO: 493 - DNA, 499 bp, unidentified
  source 1..499: mol_type = other DNA
agaatttctgtcttggcctccgaccaaaaccgaagagaccaagaaggaagattattcacccttattagcaatatatctcaccactctcccactatggcagaaaacgatattccagccgaaggaatcccagcaagacctccgcctgccgctaaccccttcacgggattaaaccgtgatgaactcgaccgcatcgtcgagcaaccagaagaggataaccaaattggtttattccgagataaggctagatcttatcgaagatacgtagacttacgtacctctccgcttagtacaaggttaatcaacttgtactcaaaccttttcaccactcactggaacgtgttcaagcacaccatgtctggagaagcccccgccggattcgcctcaaaagcgatctacctggcaacgatctacgtatccgcatggatatgggatcttcatgtctccatcagagaatctgtgagaaggatctctggtactgctttcaaccagctgtttcagc

SEQ ID NO: 494 - DNA, 500 bp, Pepper cryptic virus 1
  source 1..500: mol_type = other DNA
agaatttgacctgaaccccatatcaggatcgaattatttacaaattcaccaaacacgtctaagcttgtgaaaattattgttatccctacattaacatgggcgatcgtgttaacgctcaagacgacgatacagtcgtccctcaccaagcacctcttcaaccagcagctcttcagcaagacctcaccagatctgccgactacttattagacaacgtccgtattggcaaccaccgacaacgctatgataaataccgtcgctatgtccttctcagatccagcgaaatattcactagtctcgtcgccatttacgctcacatcttttctagttattggcaacactttcggaggttcactgatcaatttcaagctccaactggagtccaactccccacttttgtggcacgagtctacatctccacttggcttcatgatctatactgctctattcgagaggccactagaagtatttctccattagcctttaatgagaggtactcatat

SEQ ID NO: 495 - DNA, 500 bp, Carrot cryptic virus
  source 1..500: mol_type = other DNA
gatcaaaagatcaacagctatctaacgctttttgcaatcaaaatagaacgcgaatctctgctgctctgactcaacttgttacctactctaccgttctcaacaaccgcactctctcactatggatgacaatactcctgctgcccaacccaatggcccccacgctcctgctgccgctgccccccacgctgttccccctcctgcaatccctcctgctactcctgcccctggtgctgtccaacaaccacctgctccggctccccgtcgcagtcgcaaccctcatggccccactcccatctctagccgcgtatctgctccttctgcccctgctctcctagaactccctgctgccacccccatgtacaccgaacaacgccgctccgccaacttcttcgtccctgacgcccaaatgcttttccatgtgttaagcatatgtgatcagatgatgaactctactgagcgctttctccgctcttctcctgcctggatgccaattgtctctc

SEQ ID NO: 496 - DNA, 500 bp, Crimson clover cryptic virus 2
  source 1..500: mol_type = other DNA
agatttatttaaagccgccccaagctctaaatattaagaattcacattcgtctaagttatcaagttctcacaaaacctctgctctaattatcaagatgactaccaactcatcaaacgcccgactcaataagctgaagaataacactgttcctcttcctttcaatgctactgaagtccctgaacccgctactgacctcctcacttctatgaaggagaatacttctgctcactctgctactgctaatcaatggaccatcgatctctttcccaacatgattcctgtcctaatccacgttatgtctgctgcctcacaccatgctaacgcgattaactttcgtgaacactcgaagacctctgctgctactgttgccatgtaccatatggccgtcgtttatggatacttccttttgaatgatctgaacattcgtctcaatccttccgctcacgcccgatcctgggctgaagcctcatggaaatctgaatttgttgaattcctctac

SEQ ID NO: 497 - DNA, 500 bp, Beet cryptic virus 2
  source 1..500: mol_type = other DNA
agaattatcatcttagtcttgcgataattcagttaagactaagaagtaatcttaatttacctattaacgctttattgtttcgtacaatactacccatagcgcgacaatcataatgactggacccacacaggcccacctcatcgaagcgacaagtttcacgggactcaaccgtgacgagctcgacagcatcgtggacgccttacaagaggagaaccaaattggtacctttcgtgacaggccaaaagcctacaggcgatatgttcacgtacgctctcaggagctctttgatcggctaagcgaactctatgccgatttatttacaagtaattggtctgctttcaagcatgcctatattacagagccaactggccgtgaagatgcaaacagcatctcaacgaaagcctctttcatggctcaatgttatttgaccgcgtggttctgggacacgcaatactgcatacgcgaaagcgtaagaaagttgtcaggcactgcctacaacc

SEQ ID NO: 498 - DNA, 500 bp, Beet cryptic virus 2
  source 1..500: mol_type = other DNA
agaatttcaccttagtctcagaaattctttacagagactaagacgtgttaaattattttacccatcacagctatataacttccaacttcaaccctacaccgaagaaagactttactttcccattcaatggcaccgaatgacgaacttgctgcaaaccttcaaggactcaaacgtcctgctcttgacgaaatagtgcattatcttgaggaccgtaatcaaatcggtatatctcacgataagaacttgtcctacaataggacgtgtgtactactcaccaatgagttacatgccaggctcgtgactctttacacgaacctcttcaccacttcatggcgacactttaaaagtgccgttcgtaaggaaatgccccgcactgaagccaatccacaacgctggctggccaactgctacataactgcatggttttgggatctccaagcctccatccaagaagccaccaagaccttgtctggtaagatttaccaagactacttccgaga

SEQ ID NO: 499 - DNA, 500 bp, unidentified
  source 1..500: mol_type = other DNA
aattgaattgcattctatctcggtcttataaacttaaagaattttagtcacagcagattttattttctactcccctcccccacattatcatggacaaatctaagaagtatctatctgatgctaaagaaatcatcaaggctaatggtcttgaagaaaaatttctcgccgctgctggtctttcatctatggatgaactcgaccctaagaacttcgctgagtttgaagctcctgctcctcctcaagttatgaagccctctatcgccgctgcccccatcattcaaaaaccgctttccaagcaggttgctgatgcctctactggctttaatccagagagcgcttctgatatgctcagaccatttattggtctaaagattaactacaaagctaggaagactgtatctacctatgctccgtcctctcttatgatggattatattctccatcaagttaacaatttacttgttgataatttctactttcgtcgggcttgccccgattac

SEQ ID NO: 500 - DNA, 500 bp, unidentified
  source 1..500: mol_type = other DNA
gagaattattcaatataaaataatcaacacttagcattattttccttactagcgcccactatggcagctttaggtgatggtgttccaccgattgcggacaataacaacccgcaaggaagagatgcaaatcccattaggggaggaactgatcccctacgaagagcaactgactggttggaagacaatagtaaaattactatgacgttccaccgtcatgctaactaccgaaggtatgcaacattgcgccttcaagagatgtttaatgctctggtacaattgtatcagaacatattcatgtcccattggcatcatttacgccggacagttgagaactaccaagttccagctccactggctcagacgccatggctttatgtagcacgtctatacatttctgtatggattgttgatctttacgcctctatacggcgcgcatgcttacgcgtgtgccctgaggcatacaacgagtattatactcaagattatcagcaggtagtctt

SEQ ID NO: 501 - DNA, 253 bp, synthetic construct
  source 1..253: mol_type = other DNA
tgctaattctctttttatattaatttaatttttaaattttttcatgtttaatatgtttttctttaataacaattaattttattatatttgatttttttttttttgattttttttttgtatttgaactttagaatttattattttttaatgttattttttattcttgaaaaaaaaaaaaaaaaatcaaaaaaaaaaaaaaaaaaaaaaaaaaaaaattacataaaaaacacaaagaactctaaaacaccttccc

SEQ ID NO: 502 - DNA, 500 bp, White clover cryptic virus 1
  source 1..500: mol_type = other DNA
gataccaacgtccgtgactggctctaccccgctgctgctgctattgctcctttccgttctacccgctttttaccgcgtcgtgaactacctgcgaccctagctgtccgtttcgcccatgccgatcatgagatcgaagaacaagctgaacagtattccatactgtgtcacaccaatatgaagtggtatgtcaacaacgccactcagaacaaccacacagctattgaaggaaactacattcaccaaggtgagtactggaacttcacccctttccgctactctcctcctgtctctctgaagacccagtttgctcaagtgatcgcttcccgctaccaccaacaagctgccaaccgtgctgaatgattcctccgacctttgatgtcgttaatctcaccaattttgctgcctaagtgcagttaatctgatcagattggattttttttgttttaactttcttttaatcaactttatccttttaattctgacctattatcgctcttgcg

SEQ ID NO: 503 - DNA, 500 bp, Vicia cryptic virus
  source 1..500: mol_type = other DNA
actggtcgattcaaccctcgtcgtgaaatcccggcccaactccgcatccgcttttctcactccgatcatgaactcgaactccaagctgaacagtacgctattgctgcgcacaccaacattaggtgggctgctaacatagctacacaacatgaaaggaccgccatcaatccggctcatcttcaccaaggtgattactggaacatgacccctttccgtcacaccggacatctcggcctcaagactcagtatgcccagctcatcgcttctcgctatcaccaacttgccgccaaccgtgtcgactgacaacctcctgacctagaacgtcaataaacttctaattttgctatctttgatagttattctgatcagaatagttttttgtttttttccaactcccaacttagttttctttaatacaaatttttatcctctctgacattttgttcgcccaaagtaaaaaaaaaaaaaaaaaaaaaaaaaaaaaaaaggaaaaaaaagtt

SEQ ID NO: 504 - DNA, 499 bp, unidentified
  source 1..499: mol_type = other DNA
tgacgaggatgccccacctgtcattgccgaacctggctactactaccccaatcccaaccccgtcctctctttgacgctcgtacctgcattgaagacatctcttctgcacacatgttctccgctatgaccttccatcccaatctcataccatacggagctaacagagctaactttctgaaaggacagttttggaattgccaccccccaagctacagcgctcctgcccaccaggtctatccagctgtatccgcccttatcgctcgtgagtatcacagtgaaactaacctttcatctgacaagtgactctctcgacacccccgacacccctctcgctgatgacgaagatgtgaccggagtagacgctagcgcgttccttcggaatttttcggttcttttgttttgtcgttagctacgactttttcttatttcaatgtaaaccctacctattagctatcttttaaattaaaagaaaaaaaaattaaaaaaaaaaaataaaacc

SEQ ID NO: 505 - DNA, 500 bp, unidentified
  source 1..500: mol_type = other DNA
ccacggtacatcagatctcgtctgcctgcttcctcctacaaactactctccgcttgctgttgcaacccgaatgctcttcctcgctactcaggacgattctgacgaatgtactgattttatcgaatggccagaagatctcggtgattatggaacacagctgaaagaagccccacccaactccaatgttcgtgcatttcttgccttatgccatggacccctagaagaatggagcaatggacatgcttaaatatttatttatttatggtcatgtaataataacacaacccctaagttttgctgaactcttaagttctacttgattttacaatcgctaagaactaccttatatttatttatttgtgtatttctcttaaacgctgatacttttacgtatcacatcccgcacacacacacgggatggtgatgtgttatcttctagacggacttatcgtcaatgacgataatctcctactagaaggtacacagcaccctctcatatc

SEQ ID NO: 506 - DNA, 500 bp, unidentified
  source 1..500: mol_type = other DNA
ttacgccagcactttgaagacggaatcttcgagctgcaactcccacttccagaagtgaactttacttcttcgatggctttgaccctatctctgtttctaaatgcagaagaagtcaatgctactagcgagatattcgacctcacccctgttggagctgatatatacggctacatcatgcgcgaaccacacctcggtatcaatgtttcaacatttgaagttattgatgaaagcgccaaggagatcgtatctaatgtttaattatttattaattaacgcccagacaatgtggaccatgtttaattttaattctgagacaatttgaattattcggttttgtaaccttaaactatgttggtttaattttacatctgtgttaaaagttaactcgtttatgcctagattctctgaatcttgtaaggttgtactaaaatacatctttatgcaaaactttcgagtgatgcggcgacctaccttctataggccgcccgcagcaccttatc

SEQ ID NO: 507 - DNA, 500 bp, unidentified
  source 1..500: mol_type = other DNA
cgctgcccacttccagaggacaactacactctcgcaggtgccaccgtttttatgctcttctaccatgacgttggatcggaccccgcaatcgatctcttcaacatcgactctcttggcaatgatgactacggctcattcatccgcaacccacgcgatggattcaacgcctcgtcctactacgccatctcttcagagggcaccgatgaaatgtggaaatcgtccgcttagtacaagcgccaaatcttgtctaaacgggaatacccgataatttgtgtcgttctatttaaactttatcgatttaaatggtctgtaataatgaactcgttaacttgagctttattttaagtgtgattttctttcctacttggttttgcaattattttcttgctcctctcatctaatcaatagatgttgaggctcttctaagtaggtgcagtttagaaaagtttagtcttatgactctacttctccattctaaacgtgcacactacactatagtc

SEQ ID NO: 508 - DNA, 500 bp, unidentified
  source 1..500: mol_type = other DNA
gatcaactttccgccgcttcacttcaacgaccatctcgcaaatcttgcgatcatgtttctcggtaactccggtgctgacaggaacaacgcttctatcatcacaaccaagacagatgaccaagactacggctggtacgtcaaagacatccgcgaaggcgaacaagctcgcgcttttgctgctctctgccagtgggacccccgctactggaacgagaaaaataatgtctgaagtcccttgataatttgtgtttgaactactttgatgttttcaaactttacttttattgtcattgtatgaacttattaattatggaaatctctttctctaatttcttatctctagttaatcaaattaactgactatgcaaaaatataactacttaatgaagcataatgcttcaacaaccaagtggtgtgtctttgcagaactcgagaacgatctgaggatcgtttctccatccgatggatgtgattctgcaagtcacactacacaaaatttc

SEQ ID NO: 509 - DNA, 500 bp, unidentified
  source 1..500: mol_type = other DNA
agcactacgaggatcacgtcttcgagctgcaagtcccgctacctgaggtaaactttacttctgcgatggctataactcacactttattccttgaaggagaagctgctgacccatcaaacgcggtattcgatctcaccccagtcggagccgacacatacggctacattctgagagagccacacttcggaatcaatgttaccacataccaggtcattgacggaagcgctcaagagatagtttcgaacgtgtaacttatgttacgaaaccgataatgtgaacaatttatgtttgaatctttcctgagactattcattctggttgttttgtaatatttgaactatgttggtttaattttacatctgtgttaaaagtctactcgttacaactgcctagggctgaccccctgccgtgatcggaagccccccctttcatttcacgtgctttacttacgagtgatgcggcgaccccaaattttttgaggccgctcgcagcacctgatc

SEQ ID NO: 510 - DNA, 500 bp, unidentified
  source 1..500: mol_type = other DNA
acttacaagctcaacaatgcccatggcactaccgatcttgtctgtactatcccaccaaccaactactccgatcttggtgttgcgctgcgctcactatttctggctactgctgctgactctgacgaatgttcagaaatcatcgcctggcccgagggcactgccgactttggcaccaatctccgcgagaacccacccaactccaacatccgcgcatttcttgccttatgccacggacctctagaagaatggagcaatggacatgcataattactaactatttatggtcatgtaataataacacactacttaacatttgctgcttgttttgctagtatcactaaaactttgatttatcaggccaactcgtatttatttacacttttatcgacggtacttttacgtatcctcaacccacacacacactgggttggtgatgtgttatcttctagcttagaaatcgtcattagacgattcatgttagaaggtacacagcacctact

SEQ ID NO: 511 - DNA, 500 bp, Beet cryptic virus 1
  source 1..500: mol_type = other DNA
ttcctttgcagccgcttcgccccaagaagagaaatcccgaatactctcggtatgatcttctcccatgctgaccatgaactcgaggaacaagcagaacaatatgctatcctcacccataccaacatccgttggtctccttccgtggtcgctcaaaatgcgtggaccgctgtcaatgacggcgcgtctcgcaatggtgactattggatcatgatgaactaccgtttttcaacgcgtatttcactcaagacccagtttgctcaagtgatagcctcacgttatcatcaacaagcagcaaaccgcgttgactagactgtcacgcctttgctaatttcgtcgccctcctcactgctttttgcagcctttctgatcagatagggtttttttttgtttaatctcatttctatttaaatttcacctccttcagaatctccttttataggggaattcgtttcgttttgttttgacgttcgaagaaaaaaaaaaaagaaaaaaaaaaaaaa

SEQ ID NO: 512 - DNA, 500 bp, unidentified
  source 1..500: mol_type = other DNA
cctccacgtccaggaaaaggtctcgtaccaccagctcctctaccccaggctcactggtcatctgtaagtatatctgtttgtatccataccgattacattacctccctgttcatattaacatctcactatttaattagctgaaccgacccaaagtcacgctcaaacagctcgcgctgaagaagaagactacatctgcgcaccacgcttccgtctcatcgactggtgctacccgttccgcgtcatcatgggatcgtctgctcaagacaaatatgcggctcaccgcatgattgcttttaattaattttaattatgctttaaaacaatctccccttttggctatgtattaagactttatggatttaacctttaatggtttatttattttgctctttgcattttatctagtattatgtgatttgaatcgcataatggcagcaggatttattcgatcgggtatataccttaagtatataccaacaagatcatttaaagaccttgcc

SEQ ID NO: 513 - DNA, 500 bp, Primula malacoides virus 1
  source 1..500: mol_type = other DNA
ctttttacgttatgcgcaatctttcttcggttttcacaccgtagattctagttcaaatgctctttctcttgacaccattcccggaatgacgaatggtctgttacacctctggtctccatactcttacactccgtttgagaatgactactttccagacccagacctcgctgaatcaaggcactacttcttgtccaatctgcgtaccatttttggtactgactacaatcttgttcaagccaagcacccttatgaagctctccctgttgtttaggctgattctctctttttctcgaaattttatttctagttttgatgtttattaggcttccctttcaacaactacgtgtatgctacgtagtcttttgtttcgattttatttgtacctgtactttcttttttcgttattttctgttctagaaaaaaaaaaaaaaaaaaaaaaaaaaaaaaaaaaaaaaaaaaaaaaaaaaaaaaaaaaacaaaaaaaccaaaaaaaagttccc

SEQ ID NO: 514 - DNA, 500 bp, Fig cryptic virus
  source 1..500: mol_type = other DNA
gttggattcgtcaccgacagaacagtcatggacccacttgcggcactagctgcaccaactggcactccaagatctgaagaagcaacatcggcaggcagacctgttcatggcatgtacaatgtcaaccaccgcggcatacaaccagctgcaggtgaacagaacccctcaggctgctacatcattggtcgtggctatgaacgccgctacacatgctacctcgcacgccgaatcgctgttttcgaggcgaaccgcattatccgttatcgctttatgcgttaatttgctatttaattgcagtttaatttctaattcagtcgtttatcagacaatttaaactatggtttgtaatgaacttatttaaatgaatttcagtttttatggaattgtattatgattttataattgttaaaacttaccatgtattggtataatacgcttgactgatgaatttctctttggtgtatatcatgtatgcaccggagaatccatcacgcctaccc

SEQ ID NO: 515 - DNA, 500 bp, unidentified
  source 1..500: mol_type = other DNA
ttcttcggagcagcagagtatcggacgatttccactcgcatgtgggaacttcccttcctatcagctgtcgccggacagatgtcaggagcaaagcgcccagctccagaaagctcggccaccggaagcggatacatggaatcacctccagccgttgaaggtcaacagacagcagcaattatggatcctggaataatgcaaacgcgttattgtcagtatcaaatcatcgattggtgttatcatggaagagtaatcctcaacctgaacgctcagaagcaaaatcaagctctccgctcaattttgttctctccaaattgatgtactgttgtaatatttcgttttgttgtaattcgaactgcttatgtataacttacaattttgaacccatgtaagtttaacatttgattcaatgaaattcgcttttcgcaaaacggggtaacaggctactgtaacgactataagtcccctaacaaggtcttatggcggaactacagccccttact

SEQ ID NO: 516 - DNA, 500 bp, White clover cryptic virus 2
  source 1..500: mol_type = other DNA
tcgctatgtccagcccttcttcggttttcacactgttgatcgtactgctaatgatgctgctcttgatgctgttcccggtatggctgaaggccatttgatgatctggtccccatacacttacaatccgtatgagtctgatgattatcctcccgtcgcccttgatgcgtctagacactactacctgactaatctgcgtaccatttttggtactgactacaatcttgttagtgtcaaacacatctatgaatcctaccccgctgtctaagtgattactctccttttcttttaattaaagtttaaaagtttttgatgtttaatcgttttctttccagcgaacacgcctacactgcgtggttcttttgtttcgttttaattttatgaacttttgtttatgtttttttcaacgttgttttcttattaagaaaaaaaaaataaaaaaaaaaaaaaaaaaaaaaaaaaaaaaaaaaaaaaaaaaaaacaaacaaaaaataaaaaacccc

SEQ ID NO: 517 - DNA, 500 bp, Red clover cryptic virus 2
  source 1..500: mol_type = other DNA
ctatatccagtcttttcttggatttcgcactgttgatagttctgccaatgaagctgcccttgatgctgtccctggaatgaatgaaagcttgctgatgatctggtccccatatacctacaacccatatgagtctgatgattatcctgctcttgcttatgatgcctctaggcattattacttgaccaacctccgtaccatctttggtactgattacaatttggttgccaccaagcacatttatgagtccttccccgctgtttaagcaattactctcttttccttttaattaagttaaaagtctttgatgtttaattggttccctttccagcaatcacgtctatgctacgnggttcttttgtttcgttttttattcctgaacttttatgtttaatgtttttcaacgttgttttctatttatggaaaaaaaaaaaaaaaaaaaaaaaaaaaaaaaaaaaaaaaaaaaaaaataaaaaaaaacaaaaaaccaaaaaaaagttccc

SEQ ID NO: 518 - DNA, 500 bp, Hop trefoil cryptic virus 2
  source 1..500: mol_type = other DNA
gctacacccaatctttccttggattccgcacagttgatagttccaataatgctgcaaacctcgatgctgtccccgggatgactgaaggtcttctgatgctctggtctccctacacatacactccgtatgagtctggtgattatccattcgctgatctcagtgcttctaggcactattatctgaccaacctccgtaccatctttggtactgactacaacttggtttcagttaagcatccctatgaagctttccctgtcgtttaagcaattactctctttcctttaatgcaatttaaagtttttgatgtttaattggtttcctttaatgacaatcgcgtgtatactacgcggttcttttgtttcgtttttcttctgaactttttagttcagcgttttcaacgttgttttctgtttatgaaaaaaaaaaaaaaaaaataaaaaaaaaaaaaaaaataaaaaaaaaaaaaaaaaaaaaaaaaacaaaaaataaaaaagttccct

SEQ ID NO: 519 - DNA, 500 bp, Dill cryptic virus 2
  source 1..500: mol_type = other DNA
gttacattcagtcctttttaggatttagaactgttgatgcctcctccaatgctgctactcttgatgctgtcccgtcgatgcccactgatcgcctaatggtttggtctccctacacatacaccccatatgaacctgatgactatcccattcctgatcttggcgcttcaaggcactactatttgaccaatcttcgtaccattttcggtactgactacaaccttgttcaaaccaagcacccttatgaagctctccccgtcgtgtaagcaattactctcatcccccttatttaagtataagtttatgatgtttaattggttcccttctcgacaaacacgtgtatgctacgtgatttgttttgtttcgtttatttcgtgaactttaatatattcacggtttttaaccgttattttctaattaggaaaaaaaaaaaaaaaaaaaaaaaaaaaaaaaaaaaaaaaaaaaaaaaaataaaaaacaaaaacaaaaaataaaagttcccc

SEQ ID NO: 520 - DNA, 500 bp, unidentified
  source 1..500: mol_type = other DNA
aatttgctcattcagaccatgaattagaagagcaagctgaacaatatgccatgctcacccacaccaacatcaaatggcatgcgaacctcaccgcccagaacaactggactgccatcactgctgacgggctctatcttggtgattattggaacatgatgccttacaggttttttgctccacttcactacaaggcccaatttgcccaaatcatcgcctctcgctaccaccaacaggccgcgaaccgcgccgaataggcttcgaccaacaacaaaattcatcgtgcaaaaattttttccgctcccgcgggctatttgatcagaaaggattttttttgttttatcaatttaacaattctttaccttttttttttttgcaagcacttcaagggccgtttttttttaaggttaatttttttgaaaatgggaaaaaaaaaaaaaaaaaaaggaaaaaaaaaaaaaaaaaaaaaaaaaaaaaaaaacaaaaaaaataaaaaaactgcc

SEQ ID NO: 521 - DNA, 500 bp, unidentified
  source 1..500: mol_type = other DNA
acctttcgccacatcccgctatgctccccgccgtgaaataccaaatcaacttgctgtcaaatttcaacatgctgaccacgaggtcgaagaacaagccgaacaatatgcgattctcacccacactaacattaagtggtacgaatcgcttatcacccagaatgcgttaactgccgtcaccggtaacctcgtccaccaaggcgactactggcgtatgatgccgttccgctattctagtcccatcagccttaaggtgcaatatgctcaaattattgcctctcgctaccaccagcttgctgccaaccgtgctgaatagacctctgaccctgatgtcaacaaactcactttttgctgtccttaaccgatagtcattctgatcagattggatttttttgttttgaatttaactttctttaactttatcttttccttctctgtcttttctttccgcccttgcgggaaaaaaaaaacaaaaaaaaaaaaaagaaaaaaaaaaaaaaaaa

SEQ ID NO: 522 - DNA, 500 bp, unidentified
  source 1..500: mol_type = other DNA
acatgcccggccagaccggaacaacaactgacagtcgtaagcgcccacgtcccggcgagtcaacctcagcccctgctctcccgcagacatcggagccgcaaacgcaaatgcaagtcgacactcccccagctcccaagccaagattccgtctcgtagactggacctaccactacttggtcgttctcaacaaggaggatcacactcgcttcgctgccctcaaaagcatctgctggaactgaacccagcaatttagtaatatttatctattattatgcttttctctgaaccctctctctgcaactttaaactctatttcttatggttttctgtttagactttatttatttaagtatttcgtactttaactaactattcgtactaactatttgtttaactaactttctagtttgagcattggtttgcaaaatggttcaggcccacattaaagtgtgggcttaatttactgattaagccttcccactttacgtaggacccgtgct

SEQ ID NO: 523 - DNA, 500 bp, unidentified
  source 1..500: mol_type = other DNA
gagacttttgctgatccccgcttctccgccgatccaagagccctctatcccttcagtttcaagctgaagagcaccgcccacaacctccccccacttgcggaagctgccgcagccttctcccagacgcacatccggatttttccggaatacccgttggccggaaactttggtcaaaagaccgacgaatcaggccccttttgggacatcaggcccattggctccagccccaccgacgacacctcctacctcaccatcccacccatggtcaaggcagcactcatcgagaaaggctccagccgttaggagtcatgcactgacagacatcagccgctgaccaccttttttctttttcctagtatctcggatttagaaagcagcaattttacaaaagcagtcccattcggactagctgctttttcttacgcatttgcgtttgcttttcccttttagtattccttcttttattactaaatgtataacttaaattaaaaagaaaaaaa

SEQ ID NO: 524 - DNA, 500 bp, Cannabis cryptic virus
  source 1..500: mol_type = other DNA
cgattcaacctcgctatcaatgaagaacgcattggcaacattctcccaggaatgactctacttgatggagtcactgtcctccggtatgttcagtcctttctaggattcaacaccgtcagccgtgctgacaatgccgataatggagacaatgtcccggcgatgccccggaacctgcttctggtctggtccccgtacacgtacactccgtatgaatctgatgacctgcctgaaccagcacttggcgaatcaaggcactactacttgacaaacctccgtaccatcttcggaacggactacaaccttgttcaagccaagcatccctatgaatcgctccccgtcgtttaagcaatctctctcatcctcttaatgtttaagttttatgatgtttgattggcctccttttccgacaaacacgtgtatgctacgtgttttgttttttttcgttttatttcctgaactttttattttcagtcttttttaacgttattttctactttaag

SEQ ID NO: 525 - DNA, 500 bp, unidentified
  source 1..500: mol_type = other DNA
ctctcctcattcaagtctagccgcttctccgccctcagagaaatccctgctctcctcaccgttaggttcgagcatgctgatcacgagcttgaagaacaagccgaacagtatgccattgccacacatactaacatgtgctggtctaagaaccttacaacccagaacaactggactcaagtagctgaagccaatgtgcactcaggcacttactggtctatgacccctcatcgggcacacgcctctgtaaggctgaagacacaatacgcccagctcgtggcctcccgttatcaccaacaggctgccaaccgtgtctaagtttggacccagaagtccttaaactctaacccattttgctgtcaaacagtctatctgattagaaagggttttttttgctttaacttaacttttatctttaattttctctttcctatagtgattcctcgcttcctcccgaagcgtattcttggaagctcagcttccgacctaggaacaaaaaaaaa

SEQ ID NO: 526 - DNA, 500 bp, Pepper cryptic virus 2
  source 1..500: mol_type = other DNA
cggaagcgctgaagttcgaacctatgctgaagagaaagtaaaccttactcgtttcacatctacaggtcacgaaacttcgaagaaaagaagtaagccgtcctcaaccaccacgacctcaagtcaaggcggatccagggacatggaaacagaagatgaacctcgtgaagtcgtaactgatatcacattatcacaggttacatccactcaacaactacaaactctaatgactacaggagaagcagataggtttaggattatcgactacacttattattgctgtgttattcttaggaataccgctcagaaaagagacggagcaattagaagtttctgttttaagcagtgaatttaaattatgtattgttatctttgctattaatgaaattatgttttgttaatatcgagcaacgttaactcttttaattttcgcttcacgatcttaaaattgggcataaggcactaaccttgtattaatttacaagaggttagtaccccttgtc

SEQ ID NO: 527 - DNA, 500 bp, unidentified
  source 1..500: mol_type = other DNA
accatcccacctcctgacgcagcgacttcagcagcctcgcaaccaggaaagagaaaacaaggcgattcatccacatcagcaatggcgctaatggaaacagacaaggacccaccgcagcccttcgttccaccaccgcctgtggacctgaacagataccgtctcatagactggtgctaccacgcacgcgtcatcgacggcgaagatcagcagactcgcaaccgcgcactaaggaacttcatattccaagcaggccaccaacctacttagtagttcaagcgttaacataatttaattaatatgtaacgtttaaactttgaaccttctttattgttcttgaactctcttcatttatgcatttgaacgtttatttattgtttaatgttttgatttaattcgatcttaaaccatgaatgcaactttcaattgccttaaaatgggacgcagacataacgtacatacgttagagatagcactctaacgcagtcgttatgacccgcgct

SEQ ID NO: 528 - DNA, 500 bp, Pepper cryptic virus 1
  source 1..500: mol_type = other DNA
ccgcactcgtgaaactgaaaataactatttcttaccagatagtcttctcaacatcatcgaggattttaccgcaacaggtacaacacaacgaaggaagatccgtcgcccttcagctacgtccgcgtctaccggagccgctatcattatcagagatacgcccggaacagcgtccactgcaaccacgtccactacggagaccgaagttaccttccctccagtcatcaggactaagattagagactggtactaccactctcgtgtaattctagaacttgaagacaattctaggacagcagctttaagaatgtttatcattgcttaattagctttcctttatgcttttgtcatgttataaacaatttcgtttaattttaatattaatcgcagttaattttatacatgtgctctgttatttgatatcagttccgcataatggacaggctacaatacccttcagtagggtcacaaacgtgacccaggaagctgtattgcaccctgct

SEQ ID NO: 529 - DNA, 500 bp, Carrot cryptic virus
  source 1..500: mol_type = other DNA
gaaccgttcaccaccacccgctatccgccgcgtcgcgaaatccctgacgccctgtcaattcaattttctcatgctgaccatgagcttgaagaacaggccgaacagtatgctatgctcacccataccaacatcaaatggtaccagaacctggaaacccagaacaactggactgccattgctgctggagggctttaccttggagactactggaacatgatgccttataggttctctgctcctcttcactacaagtctcagtatgcccagatcatcgcctctcgctaccaccaacaagctgccaacaaagccgaataggcttaatgactcttacaaagtcgatcgcgcacaattttctccgtttttaaacggactatctgatcagaaaggattttttttttgtttaatctatttatatcttttgcaaatttctatctccttcttatctgtactactaagtacaaattttgttccctttccttctacctagaagactagttagt

SEQ ID NO: 530 - DNA, 500 bp, Crimson clover cryptic virus 2
  source 1..500: mol_type = other DNA
tcaactatgctcaatcctttattggatttaaaactgttgatgccactaggaatgatgacgtcctggatgctgtccctggaatgcccctgaataacctgattctctggtctccttatacctacactgcttatgaggatgaaacctatcctgatcccgttttcagtaattcccggcactactacttgaccaacctccgtaccatctttggtactgacaccaatttgatcaaggccgtccacccctatgaagcctaccccgtctcttaagtgattactccttttttcctttatttattaaagtttctgtttaatctattttcttttgatgacaatcacgtgtatgctacgtgattcttttgtttcgttttatttaatgaacttttctgtttgttttttttagtcgttattttctttaaagaaaaaaaaaaaaaaaaaaaaaaaaaaaaaaaaaaaaaaaaaaaaaaaattaaaaataaaacaaaaacccaaaaaaagttcccc

SEQ ID NO: 531 - DNA, 500 bp, Beet cryptic virus 2
  source 1..500: mol_type = other DNA
tactacctcaacacaagcgaagaacaagcgcaagaaagatgctgcaccagagcagttatctaccggacaaggagatggatcatcatcatcgaaagatgctgagatgtctactgaagaatcagaagctccaccaccgccgaagattccaagaccaagacaaatccatcaattcagattgatcgactgggtttaccactcaagagtaatcctaggagctgacaaagctatgcaacgacgtgccctttgggacttcattcatgctggagcaactccaagtcatcaaccaaggccttagtttatttgttttatattttaattaaatgtaatgaacaatgcaacttttggtttatttatcagaattttcagtttgatgtttaacttatcattgttatttatcacagtatctaacacactggtagctaaccgcactgatgaacagataaagggcagcaggcatgtacacccacaggaaattcctgagggactatacagccctgtct

SEQ ID NO: 532 - DNA, 500 bp, Beet cryptic virus 2
  source 1..500: mol_type = other DNA
gcagagaaactacactgtcaattttcctgagcttctaaagccaagagacaccggagcacgggctctagtcaccaccacccagagagcttcaacttctgggtctgttgaaccgacgacaggtgctcaaccagaacctgagacaccaacttttcagataacatttcgacaatttcgcattctcgattactgctatctagcgaaggtcatccacaagtctaattcccagatgatcaacaaggcactccgcaacttcatccagaagggagcctccaagaagaccgagtaactaatgtaataaattagattagttaaaactctgtcatattttgtgaacattttgaccattttgtgaacattttgacctacttttatcaatgaaagttttatttcaagaatttgtgtgtttaactacccactgcttgttgctttctgcataaaagggcagcaggcataagaaacccattagattaatttctaacaggactcttatggcccatgcc

SEQ ID NO: 533 - DNA, 500 bp, unidentified
  source 1..500: mol_type = other DNA
gccgaccctgcctccctctttccattcgctattaagctcgaaaccgcatctcgagctcttcctgaattagctgaagcgatggctgcacttgcgcagaccaacgtgaatatctacccgacccatccctactacaaccacattggtgctgagtcgcgccgtggaccgttctggaaccttgctcccgttgaatcctccatcaccgatcactcgagctatctctcactccgagaggttgtgcgcggtttaatgaagcccaaaggctaattaaacttgccggttttcatgtcttcttgtttgaagttctgattttccgtttttccttttttgttgaaccattaattgaaaacaaaaaaaaatatttcctttgtttaattaaggttttgaagtaattctcttcccttttcgattacctcgtttttcgttcttagtacttttatttatccttttattttctacttaaagaaaaaaaaccaaaaaaaaaaaaaaaaaaaaaaaaaaaa

SEQ ID NO: 534 - DNA, 500 bp, unidentified
  source 1..500: mol_type = other DNA
ggaacaaggtttaattagatataacctacggcaaggatttaaacggagaagaactgatccttcaacctccaatgataacgacatgcctgtcgaggacattgaggagccaccacaacctgaacaaggcgaagaccccatccacccggaagaggaagccgccccaccagtagagccgcagcccgatccagctccagcaccagcccctgcaccgcaagcccccgctgagccgatcataacgatgaatcgcgttagaaggtttcgcatcatcacttactgttactacagacaagtgaccgataatgaagacctgcattctcgtctcgctgcattacgacaagtggattcactgattgcatgattaggaacacttagttttgtactgctttactttctttaaaatttcagtctttaattttagttaaatctatcttattgtactgcaatttcaattaatgaaggttttgtttggcctatataatggtcacaggctttaactaact

SEQ ID NO: 535 - DNA, 128 bp, synthetic construct
  source 1..128: mol_type = other DNA
tgattgttcgagagaattacaccccatattcaaagcgatgaacttaattttagcagtcaaaatagaaagtgaaatttagatattttaattcaaattattatctactctacacaaatctagtttcaaca

SEQ ID NO: 536 - DNA, 500 bp, White clover cryptic virus 1
  source 1..500: mol_type = other DNA
cttgtacacactttttgcaatcaaaatagaacgcaaatcttgactgctctacctcaacttaatacctactctacatggattacctaatcactgcatttaaccgaatcactcactggttcttaactccaactaatctcgaatacatcggatcctactcccttccccctgggcttcttcgcgtaaatgatgttgctgtcgcaaatcataaagctaccttagatcgctcgtttgacaagtatctctatgaacatgagataaatcttatcactaaagagtaccgccgatctcctattgatgaagactctatacttgaggacttcttctcaggtgacctaccttatttcgaaatccctttcgacgaacacgtcgaacgtggactggaatgtatggctgccgcctttcggccgcctagaccctgtcgccctgctcacatcttagatgtgaaacatggatacccttacaaatggaacgtcaatgccgaacctcccttctccactgat

SEQ ID NO: 537 - DNA, 500 bp, Vicia cryptic virus
  source 1..500: mol_type = other DNA
gatcaaaagagtaacagctcttgccacgcttttcgcaatcaaaatagaacacgaatctcagctgctctacctcaactttttacttactctacatggattacctcatttccgctttcaaccgaatcactcactggttcatcactccgaccaatttcgagtacatcgggtacttctcccttccccccggccttctccgtgtcaatgacgtcgctatcgcgaatcataaatgcacacttgaacgatctttccacacctatctctttgatcacgaaatcaaaagaataatgatagatcatcgccgctcagacatcacagaagattctattttagaagacttcttcgctggtgacttcccctacttcgaagtacctttcgacgaacacgtcgaatatggtttacagtgtatggcagacgccttccgtccgccccgaccttgccgccctgctcacatcttagatgttaagcacggttacccttacaaatggaacgtcaacgcagaa

SEQ ID NO: 538 - DNA, 500 bp, unidentified
  source 1..500: mol_type = other DNA
gataatgatcaaccgaaaaggttgattttcattatctagaagtaaattttctattgtaaattttcattatgaaattaacattagaagttacttctacacactaccgtgtatagcgagtttataagatttcaaattttagagttatctaattgtttactatcttacatccgttatatacaggtatggagcatcgctttcgtggaatccctcgtggtcttatagaactcgaagaaatcccgacgcgacgcttacgcgaggagcgcgttgtacatatagacgcctggagctcaaaagctatagacgccatcgtaccgctctcacttcgcatcgaactagatggctgggcccgaagttattatacacttcaagcgcacattgattcaatcatgcaatatgatcgtccaaagctgccgcaacccaccaatgctgcgtggaacaccaccacacaacacgtccgaacacagttcgcacggatggataaagtacagactctgtcttac

SEQ ID NO: 539 - DNA, 500 bp, unidentified
  source 1..500: mol_type = other DNA
gataatgatctattagagatcattatcataggttttagttagaaattctaggttgcttgtgtgtgaaaactatagtacctgttgagtatctaaccactacccttctgttttgcaggttaggtaaaatttttaagttttaacgcgaagatttttcaccgtaccagcgcgaaactagaagatggaccacgagttcaggaagattcgtgaaggtctcatagagatcggcacagtttcccttcgtgtccaaagagacgagtttaaggtcatcattgatgaatatgccgcagaagctgttttcaagtttgttccttcaactatgctctcacaactccagggttgggccagaagtgtttactcactagatcaacatgttgatgccatacttgcgtatcgtcgtcaaaagttgcctgagccgacagatgatgtttggaaccaaaccaaacaacacaccttgcaattgttccgaagattccccaagatcacaccgatctcgtacaagt

SEQ ID NO: 540 - DNA, 500 bp, unidentified
  source 1..500: mol_type = other DNA
gataatgatccaccgaaaaggtgaattatcattatctcagaagtaaaattcttaagtaagtttcgttcaagaaattaacattaagaggtacttctgcacacatctttgtgtaacggttttataagaagcttttctttacagttatctgtattttaactatcttacatccgtgtcacagaggtatggagcatcgcttccgtggtattcctagaggtctcattgagctcgaagaaatcccgacgcgacgcttacgcgaggagtgcgtaatacatatagacgcctggagctcacaagcaatagacgccatagtaccgctctcactacgcaacgaactagatggctgggccagaagctactacacgcttcaagcacacgttgattcgctcatgcaatatgatcgaccaaagttgcaaccacccaccaataccgcgtggaatatcaccacacagtatattcggactgaatttgctaggatgaagaaagtgactgcattgtcttat

SEQ ID NO: 541 - DNA, 500 bp, Beet cryptic virus 1
  source 1..500: mol_type = other DNA
gatcaaaagagtaacagctcttgcccatatttttcaagatcaaaatagaaattgaatcttagctgctctacctcaacttgttacctactctaaatggattaccttacctccgcattcaacagaatcacacactggttcaacgtcccttccaacttggaatacatcggaaccttttcgctcccccctgggattctacgtgtcaacgaagttgctatttctaatcacaagaaaacgttggaacactctttcaacaagtacctttatgcacatgaaatcaaattaatcacccaagactatcgccgctctgacatagatgaagaatctatactagccgatttcttttccggtgacgtcgaaaagttcgaagtaccctttgacgaacacgtcgaaaccggtctacgctgcatggcagacgctttccgtccgcctagactttgccgccctgctcacatcttagatgtcaagcacggatatccttacaagtggaacgtcaacgctga

SEQ ID NO: 542 - DNA, 500 bp, unidentified
  source 1..500: mol_type = other DNA
agaattttccccgaaacacataatcgcggaaccaagacttagcagttaaggtcgcaagatttcggtcgtgaaaatcatttcattacagccagtcttcatcatgagaagattgcgcaaccctttagctggttacgtttacacaggattcatctcggatcttgaagagacaaatcagcgacacacaaacgttattcgacgggaaaccgccgtaacgtacagggatgagtttgcattgcaatccatcctagatctggactacaggcagtacgagcaacatctacaaggttggtcgcgtagttattacacccctgagaagcatcaggaagcaattttacaatactcctatccagacataccagttcaagccattaaaatggacgtatacaacgattgtatcgcccaggttcagaacgaatttcgtagccttccaaacgtgagggcctatagcgtattaacccaattagatttggttaaatacaagtcatcatcggcggccggtt

SEQ ID NO: 543 - DNA, 500 bp, Fig cryptic virus
  source 1..500: mol_type = other DNA
ggattgtccggcaggaaatctacgcacagtgtgtgtcaagggctagatcattactttgggagctcagagaaagagttagatcaaaacagtccgcaacagaacattgtacgcgatccgccaaataatccgggtaggttttaacatggaagcaggtcttatagagattggaaacattccagaacgacacttacgtgacgaattcataatactggtcgaccaaccagcatatgactcagtgagacgaaatgctccacaagctgacatgcaagaaattgatggatgggctagatccttttacacagtagaaggcattatggcatctattatgcaattcagcaaaccactcattcatgaaccaaccgatccaatatggaacgacgttaagagagaaacactaatgaagataggtagtttgttcccacaagttcaatcattaccatttgaaggaggttttgaccacgtcccatttgaatcgagctcatcagccggctacggctatg

SEQ ID NO: 544 - DNA, 500 bp, unidentified
  source 1..500: mol_type = other DNA
ggaattacccccccactctttgacaaagagcccagagtgaatctgggagtgtcaagaccagggtagaggagcataattctttatttactcaacactatagatggcgttgagatcaattacagggtatgagttccatgattttcaatctagtttagaattgttaaatcaaactcacatccatatagtcaggcgggagtctggcgttacctaccatgacgagttcgcactttgtgaactattggtagataatacaagattgtatgagcaagagctagaaggctggagtagaagttactacaccggtgaacaacacatgaaagctatattgcagtacagtttaccaaacacaccaattcaagacattgatgtcggttgctatcagcaggcaatgaccaatgttcaagaacggttaagtagccttccaatcgtgagggcattcgacgtattgacccaattggatcaagtaagtttcgagtcgtcttcggcggcaggttacgact

SEQ ID NO: 545 - DNA, 500 bp, unidentified
  source 1..500: mol_type = other DNA
gatcaaagaataacagctcttgttacaatttttcggaatcaaaatagaacctgaaacttagctgctctatctcaacttgttacctactctaaatggattacctcacaaccgcattcaaccggattaccaactggtttaccaaaccagctaacttcgaattcgtaggactctactccctacccccaggccttctgcgtgtcaatgacactgcaatttctaaccataagaagacactggaacattctttcagcaaatatctttatgaagatgagattcatctcatcaccaaagaattccgccgatctgatattgatctagattcaattcttgacgatttcttctctggcgatgttgaaccattcgaaataccattcgacgaacacgtcgaaaccggtctacgctgcatggcagacgctttccgtccgccaagactttgccgtcctgttcacatccttgatgtgaaacatcactatccttacaaatggaacgtcaatgctgaa

SEQ ID NO: 546 - DNA, 500 bp, unidentified
  source 1..500: mol_type = other DNA
agaattttcccctgataaattatttatccgtgttgaacttacagcttcacggcttatatcaggttggattattatattcaatacactcatctgtttacatacaagatgagacccagcattacaggttatgattacacaaatttcacacaggatttgcttaaatctgaccgtaagcacccacacgtcgtacgtcgcgagactgcgactacttacagagacgactttgctttcaaggaagtaatttctctcgataggttagcttacatacagagattggaaggatggtcacgaagttactatctaccagagaagcatttagaggctttactccagtatgctacacctaatgtcccatgcactgctttgaaccttaacgtttatcgtcaagctattcaagtagtagagaatgggcttcgtagccttcaaccagtgagggcctttgatgttctaactgaactcaatcaaatttcatacaagcagtcctcagctgcaggttacga

SEQ ID NO: 547 - DNA, 500 bp, unidentified
  source 1..500: mol_type = other DNA
acaactcctgctcaagcttttgacaatcaaaatagaacgtcaatctcagttgctctatctcaacttgttacctactctacatggattacctcacttccgcatttaaccgaatcactcattggttcaccaaacccaccaatttagaatacattggagactactctacacctcctagtatcatccgcgtcaatgaagttgctattgctaaccacaagaaaacacttcgctacgcctttgaacagtatctgtacgatcacgaataccgtatgatcgttgatgaatatcgtcgctcagacatagaccaagagtctatcctcgccgactttttctctggtgatattgaaccctttgatatacctttcgacgaacacgtcgaacatggactacgctgtatggccaacgccttcagacctcctagaccttgccgccctgctcacatcctagatgtcaagcacggatacccttacaaatggaacgtcaacgcagaaccacccttctca

SEQ ID NO: 548 - DNA, 500 bp, Pepper cryptic virus 2
  source 1..500: mol_type = other DNA
agaattttccaagccgtttacttggacctagttatctaggtaggaaaccgcttgggttaaattttaattttatatttaatagataagagccaacatggcaatttatcgcatgttgaatggatatgttttcaccgcatttggtaatgatcttgagaaattggatcaaagacatatacatcacatcagacgagaagaagcgacaacatatcgcgacgagttcgctctaaaggaactcatggatttaagccctattttgtatgaacaattcttagaaggatggtcacggagttattacgaaggatcaaaacacttacaagcaattatacaatatggcatcccagacccagatccaggcttaatagataatgatatctataacaaggcaggatatgtggtattagaaagtttaggtagccttccacgtgtgagggcatttgacgtactcactgagttagactcagtacactatgagcaatcttcatccgctggctatgactacc

SEQ ID NO: 549 - DNA, 500 bp, unidentified
  source 1..500: mol_type = other DNA
agaatttatccttacttgcccacacaagaggacgaggagtccgaggagcaagcttaagggtgaaatttactattattttatcgtgacacactattacagtatgcacaacatcaacaattatgagttcacagactttactgaagaagtagaagaaactggcagaacccatcatcacgtagttaggcgagagcctgaggttacatatgaagatagatttgcttcgcaagtcttaaggcataagtatccagtcttgtatgaaaacatcatttcaggatggtctagaagttactactctggagcagaacacatgaaatcaatcatgcaatacgctacaccaaatattaaactagaacgtttacacgacggcgtataccataaagccatcgccaacgttcgagaaagtttacgtagccttccaactgtgagggcattcaatgtattgaatgagttagacctcgttccattcgaatcgtcatcatcggcgggttacgactacacag

SEQ ID NO: 550 - DNA, 500 bp, Pepper cryptic virus 1
  source 1..500: mol_type = other DNA
agaatttcccccttgttccaaggcacctctcacgctccggtgccataaacaagagattgaaattaatcaatttatatacttacctcgttacgatggtaagaggcacacttgttggttatgactatacccaatttcagggtgatttagttaaatcaactcaccgacaccctcatgttgttcaccgcgaaatcgcaacaacatatgtcgatcagtatgcttatgagcatattgaaacattcagtagtttatatcctgaacttatccttaaaggatggtctaggagttactatctgcccgagaagcatctcgctgcagtgttaaactacagtatgccaaatgttcctgcatctcagctcagtcagtcattatacagacaagcgattgaatcagctaagaatggatttattagccttccccgagtgaaggctttcgatgtacttaccgaaatggaccaagtaccttttaagtcgtcttcatcggcgggttataattacacaggc

SEQ ID NO: 551 - DNA, 500 bp, Carrot cryptic virus
  source 1..500: mol_type = other DNA
gatcaaaagatcaacagctacttccaaacgctttttgcaatcaaaatagaacgcgaatctcagctgctctaactcaacttgttacttactctaaatggattacctcacaaccgcattcaaccgaatcacacactggttcacaacacctaccgatttcgaatatattgggaacttctccctacctccaggcttgctccgtgtcaatgacactgcaatttctaatcataagaaaactctggaacattctttcagcaaatacctctgtgctgatgagattcatctcatcactaaagaataccgtcgatctgatatcgatcttgattcaattcttgacgacttcttctctggcgatgttgaaaaatttgaaattccattcgacgaacacgtcgaaacaggtttacgctgcatggctgacgccttccgtccgccaagactctgccgcccagctcacatccttgatgtgaagcatcactacccttacaagtggaacgtcaatgcag

SEQ ID NO: 552 - DNA, 500 bp, Beet cryptic virus 2
  source 1..500: mol_type = other DNA
agaattataccctagctttctagaaagacgggagtcatagtgaaagcgctagggtaagatttactactaattttattcgtcctacgtgttacttcaaacatgaggacaatcaacaactacgagtatacaagtttcaccgaagatctcgaggagacagattatactcacccacacgtggtcaggagagatcctgaagttacctatgaagacaccttcgcaaagaaggagttgttaagcaggtatccagcactgtatgaaaatttaatccgtggatggtcaagaagctattacactggacaagagcacttgcgtgcgatcatgcagtatgccacaccaaatactaactttagtgaatgtgtccaacacgcttataccaaagcgatcactaaagtgacagaaagtttacatagccttccaactgtgagggcattcaatgttctggaagagttagatctcattccatatgaatcgtcatcatcggcgggctatacgtatagagg

SEQ ID NO: 553 - DNA, 500 bp, unidentified
  source 1..500: mol_type = other DNA
gaaaatcgcactacgtgcgtaaccaaaagggttgaattattttaaatataaaatatatccctccaacactacgatgttgagagatattagaaactttcaattaaccgaattcaattcagagttcgagttattgaatgacacacatccccatgtcattcggcgagaagctgaacagattttggtggatgagttcgctttaagcgaactaaacggtgcatggccatcgctatatgaccagaaactcaaaggttgggctagaagcttttataccttagagggtcatatgcaagcgatacatgcatattctaatccagatacacctatctcttctttaaacgagaccatctatcgagctacgattgatagtctaaagaatgagttaagtagccttccaactgcgagggcttttgatgtcttgactgagctagacaagatacactacgaacagtcctccgctgccggctacaattatattggacctaaaggaccactatatggtg

SEQ ID NO: 554 - DNA, 500 bp, Beet cryptic virus 3
  source 1..500: mol_type = other DNA
agaatttaaccaaaaccccatattgaggacgctgatttcattagcgccccgatatagttttacggtgaaatttataaatttagatttcaagtacgcactacatggcgtacagaaacattcgtgagtatgagttcactaacttcaatgaagaattgtaccagattgaaggaacccacactaatacgatcggacgagagtccgaggtaattctgaatgacgagttcgcgaaagctatcctcattgacgaatttccagtgctatacgagcaagtctgtcaaggatgggctagaagcttctacaccctagaggggcacatgcaagctattctcgcatacgcacaacccgacactccaagggaaacctttgaccaaaccatttgggatcaggcatacactgccgtccagaatgagttacgtagccttccaaaagcgagggcatttgatgttaatactgaacttgacaaagttccatatgagcagtcctcctcagcaggatatggc

SEQ ID NO: 555 - DNA, 92 bp, synthetic construct
  source 1..92: mol_type = other DNA
tggttttttactagccgatcattttatttatttcaatttaaattaaaaaataaaaagtgttaaataaatcttacctaacgcctccgaacttc

SEQ ID NO: 556 - DNA, 500 bp, White clover cryptic virus 1
  source 1..500: mol_type = other DNA
ccgatacatatttcaattcaattgtcaatgtcaagaagtctgaagttcgcaactcccttaatggatgcgaagtactctcctaccgtaaccacaacggcctacctcatcgtgatgagatcactatgctagcccagttctaccacactaaggctagagatcccacacctgagataaccatggcacaagccataggctttgcttacgccagttgcgccaatcacaaccgcgtactctgggtactagaagatgtatataattattatcgtgacttaggctacaggcctaatcgtgctggtttgactctcacctttggagactcaccggaccttaccatgcctgaaatgcctcttgatcattttccaactaaatctgaaattcggcgttaccacaccgaaacccactatcagaacgaagcacagaacgctcggacttggcctagaacattgtttatcaatgctccaggcgagtaaaaagccgatcgctttgtttgtttctttttt

SEQ ID NO: 557 - DNA, 500 bp, Vicia cryptic virus
  source 1..500: mol_type = other DNA
ccgagatccgtaatagactaaatggctgtgaagtactttcctaccgtaatcacaacggcctaccattccgcgatgagatcgcaatgctagctcagttctaccacactaaagctagagatcccactcccgaaattacaatggctcaagccataggcttcgcttacgcaagttgcgctacacatacacgcgtactttgggtcctcgaagatatatataactattatcgcgatcaaggatacacgcccaaccgtgctggcctcaccctcacattcggtgattctccagatctcactatgcctgagatgccccttgaccactttccaactaagtccgaaatagtgcgctacctaacatgcactaattatcggaatgaagcacaaaacgcccgcacttggccgagaacattgttcatcaatgctcccgccgagtaaagccgatcgctttgtttgtttctttttaattaaaataaaaaaaaaaaaaaaaaacaaaaaaaaattgcc

SEQ ID NO: 558 - DNA, 500 bp, unidentified
  source 1..500: mol_type = other DNA
atacgttcagatggacaattttgaacccatctgtgctgaacacaattggacgattaacatcgccaaatctgctgtctcgcatgaagctgaaggggtatccttcttaagccgaaaagtccgtgagcactgccatgcccgtgacgaattactctgccttcgaatgctcaaatttccagaatacgtcgtagaatctggcgcaatgtcaactttgcgtgcacattccattcaccaagacgctggaatcaattcccgttacttgtattcaatatacaaataccttttacacaggtacggaaaagctgactccctgcctctgaaccaacagaactgggaccctctagagtacgagaacctacgtgtttcttttgctactcaaaactatgaataatgtaatgatgtttatcaatacactgtttgttgtcaaccaaccgaatattttatgtatttaaatttacatagaatgtgggttaggagcctgatcactcctaacccctctgatc

SEQ ID NO: 559 - DNA, 500 bp, unidentified
  source 1..500: mol_type = other DNA
tcagtaccgctcaatacataccgctcgagaagttcggacccatatgcgaaccgtttatgtggagtatcaatactctaaagtctgaagtctcacgtgaaggtagacttactacctttctcagtcgatcgatccgcgataagcaaaactaccgtgacgaattcgtttgcctgcgtatgctcgtgtatcccgaatacgaagtggaagatggaagcatctcagccctccgtgccaaaagcatctatgtcgatgccggaatacattcccaatacttgtaccatgttttcttgtatttgaaacaaaaatatggattagccaataccctccctcacaacctgaggacctgggaccccacagaacatgaagctcttagagcttcttattctaatatcatgtaacactatttaataagttactctttctcaataaaagtttaaaatttaaattgtgctgcgtgtactattacagtagtaataagttcatgcagtacaataacaaatgtc

SEQ ID NO: 560 - DNA, 500 bp, unidentified
  source 1..500: mol_type = other DNA
aaacttcaaacccatctgcgatgagaacctttggacgattaacatcgccaagtcagcaatctcacgcgaagctgaaggtgtatccttcttaagcaggaaagtccgcgaaatgtgccatgcacgtgacgaacttatctgtcttcgaatgctcaaatttccagaatacatcgtcgagacaggcgcaatgtcaaccttgcgagccttctcaattcataaagacgctggaatccattcccgttacttgtatcaaatctacaaattcctacttcataggtacggaaaggctgactcccttccgcttaaccagcagaactgggaccccatcgagtacgagaacctacgtgtttcttacgctactcagaattatgaataaaattattttatagacaataatctagttttcttcattgtcacttaaccgattgcacacctatctttaattaatagggtgcccccgggttaggagattagactttaagtctctcctaacccacctgatc

SEQ ID NO: 561 - DNA, 500 bp, Beet cryptic virus 1
  source 1..500: mol_type = other DNA
gaagtccgaattcggcaactcactcaatggtcgtgaagtcctatcctaccgcaatcacaatgggttcccccaccgtgacgagatcatgatgttggcccagttttaccacactaaagctagggacccaacacctgagatcaccatggcacaagccataggcttcgcctatgctagttgcgctaacaataaacgtgtcctctgggcacttaaggatgtttatgactactacaaagacttgggatacacccccaaccgagcaggcctaaccctgacattcggtgactcccctgatctttttgttcccgaaatctctcttgaacatttccccaccgagactgagatacgtcgttatttaacgagtacctcctatctcaatgaagcacagaacgctcgcacctggccgagaacgttgttcatcaacgctcccgctcagtaaaagccgatcgctttgtttgttttaaagaaaaaaaaaaaaaaaaaaaaaacaaatcaatttgtcc

SEQ ID NO: 562 - DNA, 500 bp, unidentified
  source 1..500: mol_type = other DNA
ttgagtatctatacagactaattttaggacgaggtcccaagatatgtcatacattaggagacgattcactagtaggtgatgacgagttgatagtcccatcctcattcggccttatcgccaatcgtatcgggtggtacttcaatattgaaaagacggagtactcgagaataccagagatggtttcatttctaggtcgatcctacaaaggaggtctcaacgtacgagatcttaaacgatgtttaagattactagtctttcctgaataccctgtcccatcaggaagaatttcagcatacagagctaaatcgatagcagaagattgcggaggcatcagcgatctactaaatcgagtagcagcaagattaaagcgtcagtacggactcgcttctgaagaagaagttccaatctattttaagcgttatttaccttttatgtaatttacatttaagttatttaaagttttattaataagacgtggaggttacatttattttccctcc

SEQ ID NO: 563 - DNA, 500 bp, Fig cryptic virus
  source 1..500: mol_type = other DNA
aaccagatttaacacagcttcagatgcttggagagcagttcggatggacgctcaatattccaaagtgcagtcttacgcaagacagccaactggttactttcttaggaaggagtcagatgcatcaattaaacattagagagagacttaaagtactccgactgatgtgttttcccgagtacaaggttgaagaccctaaaatctcaaccactagggtaaaagcaatcgctcgagatgctggatggagtgatcctgtttataacaagatttacttacagctgaagcgcttgtatggtgaggtcgaaagacttccaccgcatttagcaacatttgttgaccgttttgattttcaagatgtaaacatgtgatgcaattttattaataaaagatactttcttttacgatatttcttagttgttgaattaacaattattatatatagtgagatgtgacgtgtccgaagttattatacaaatcggacaccaccacctcctggattaacc

SEQ ID NO: 564 - DNA, 500 bp, unidentified
  source 1..500: mol_type = other DNA
cggctcaatcatcaacagattgcggatcgaatacatatggataaagcttagagggcacggaccgaccatttgttacacacaaggtgatgattcattatgtggtgacgatgaacggatcgaaccagagcgaatagctgatatcgccaatccaattggttggttgattaatccggcaaagacggcaacaacaaggtacccggaatacataacattcctaggaaggacatgttacggaggtttaaaccatcgagatcttatcagatgtctaaggttactaatctatccggaatatccagttccgtcaggcgctatctcagcgtatcgcgctaattcaattgctgaagactgcggaggcacgtcttcgatattgaatgatatcgcgcgacgattaacacgaaagtacggtcgtgtatctcatgaagaggtaccgaaagagctccgagtgtacagacactaggcagctcccgtaattttcgggaagggttcacataaccctgcct

SEQ ID NO: 565 - DNA, 500 bp, unidentified
  source 1..500: mol_type = other DNA
tgaagttgcgaacacactaaatggacgcgaagtactctcttaccgcaaccacaacggtttccctcaccgtgacgagatcaacatgcttgctcagttctatcacactaaagcaagagatccgacacccgaaatcactatggctcaagcaataggttttgcctatgctagctgtggaaaccacaaacgcgtactttgggtactgaacgacatatacaactactacaaggacaaaggctacacacctaaccgtgcaggtctgtctctaacatttggagactcaccagatctgtttgtgcctgaaatccctcttgatcatttccctacaactaaggagatacgtcgctacctgacgtgttcttcttatgttaatgaagcacagaacgctcggacttggcctaggaccttatttcttaaggatcctgctgagtaaagcccgatcgctttgtttgttattttttaaaaaaaaaaaaaaaaaaaaaaaaaaacaaaaactaactgcc

SEQ ID NO: 566 - DNA, 500 bp, unidentified
  source 1..500: mol_type = other DNA
caatcgtgaatcgactaaggatcgagtacatctggagaatcgcaacaggacatggtccgatacactgcgagactttaggagacgactctctctgcggagatgatatcttcgttccagctacacagttggccgatatcgcaaaccgcataggttggtacttcaatgccgataagacggaatactcaactataccagaaggcgtcacctttctaggacgaacgtcaaccggaaacttaaactcaagagatttaaccaaatgtcttcgactattagtttaccccgagtatcctgttacatcaggccgaatttccgcctatagagctaggtcaatagctgacgactcaggaggtctcagcgatttgcttaaccaagttgctattaggttagagcgtagttatggcattgcttcggaagaagaaattccagcttattttaaacgttatgtaccatttatgtaactttatttataaacgctttggaggctttacaaaccccctact

SEQ ID NO: 567 - DNA, 500 bp, unidentified
  source 1..500: mol_type = other DNA
acgtactttaatgccaccatcaatgtcaagaagtcggaaatcagaaacacgctcaacggatgtgaagtcttatcatacaagaaccacaacggtttcccccaccgtgacgagatcactatgcttgctcaattctaccacaccaaagcacgtgacccaacgcctgaaattaccatggctcaagcaataggctttgcctatgccagctgcggcaacaacaaacgcgtactgtggattcttagagacatttacaacttttacaagatgcgtgacgtcacccctaatcgtgcaggtttaaccctcactttcggagactcaccagacgttttcatgcctgaaatccctcttgatcattttcctacaataactgaaattcggagatacctaacatgctctgaatatcgcaacgaagcacaagacgctagaacttggccgagatcactattcattagtggtcctgccgaataaagccgatcgctttgattgtttaaaattaaaaaaaa

SEQ ID NO: 568 - DNA, 500 bp, Pepper cryptic virus 2
  source 1..500: mol_type = other DNA
tctttagaaaggcatacgatgtcggaccaaagatgtgttatacacagggagatgattcactaatcggagtagactttcgagtagacccagacagattaagtgagatagcagcaccattgaattggaagcttaatcctgctaaaacagacgtttcgttgtacccggagcatgtcactttcttaggaaggactatgtacggaggaataaatcaaagagatcttaaaagatgtctgaggttattaatattccctgaatttccggttccatcgggagagatttcagcatacagagcagtatcaatcgcgcaagatgccggaggcacaagtgagatactgaacagtatagcaaagagacttcgaagacagtatggagtcgcagaggagcacgcagttccaaagcatttcaaactttacattccataaatgattgtaatatcaacctattaacaattcatatatgaaatgatgttgaagtcggagtggctgccaacacaccgctct

SEQ ID NO: 569 - DNA, 500 bp, unidentified
  source 1..500: mol_type = other DNA
gatcattagtcaacagactacgcattgaatacatgtggattctcaaattcgatagaggtccaaagatatgttacactcaaggcgatgattcactgatcggtgacgatgaactcttcagtccaatggacatgacatttctggtcaagccatacaactggttaatcaacgtaaccaagtccatggcatccaagattccagaagcagttacgttccttggaaggacaagcataggcggcctaaatcagagagatctgaagcgctgcttacgactactgatattaccagagtaccctgttacatctggagacatatcagcatacagagctaaggcgatctggtacgactcggggttaacgagtgaagtgctaggcgaaatagctcgcgctcttcggcgtaagtatggactagcagagaaatccaaagttccaaagtatttaataccttggaaaggatgaactgcatccatacccacaccgggggaaggttctaacgaaccctcc

SEQ ID NO: 570 - DNA, 500 bp, Pepper cryptic virus 1
  source 1..500: mol_type = other DNA
acttgttggatcgattatcaattatttgagaatcaactacctctggagactcctcaccggacacccaccacaacagtgtcacactttaggagatgactcattggttggagataactcatatgttaatccacaagcgattgaagaagcagcaaacaagctaggctggcacttcaacccagataagactcaatactctacagtacctgaagagatcacatttctcggacgaacttacgtaggcggattaaataagagagatctaacgaaatgtattagattactcgtatatcccgaatacccagtagagtcaggtcgaatttcagcttatagagctaagtctatcgcacaagatgctggcggtctcagcgaagtgctaaataggatagcagataagcttagacgtatttacggtacggcttcagaagaagaggtaccaatttattttaaacgctatgtatttggagtttaaataaatacgtggaaggtatttaaaccttacc

SEQ ID NO: 571 - DNA, 500 bp, Carrot cryptic virus
  source 1..500: mol_type = other DNA
cttgccacgtactacttcaatgctattgtcaatgtcaagaagtccgaagtagccaatacacttaatggtcgtgaagtactctcttatcgcaatcacaacggtttccctcaccgtgatgagatcaacatgcttgctcaattctatcacactaaagcaagagataccacacctgagataaccatggctcaagcaataggtttcgcctatgctagctgtggcaaccacaaccgcgtattatgggtacttaatgacatatacaactactacaaggaccaaggatattcacctaatcgtgctggcctgactctcacctttggagactcacctgacctttttgttcctgaaatcccccttgaccattttcctacaaagaaggagatccgtcgttacctgacggcttcttcctacattaacgaagctcaaaacgctcggacttggcccagagacctgtttattaacaggcctgccgagtaaagccgatcgctttgtttgttattttc

SEQ ID NO: 572 - DNA, 500 bp, Beet cryptic virus 2
  source 1..500: mol_type = other DNA
cagtcgtgaatagattgagaattgaatatttatggaacctcaaattcaacagaggaccaaaagtatgtttcactcaaggcgacgactcgctaataggagatgacgaactgtacagcccaatggacatggcggcatttgttaaaccactgaactggtttataaacacatcaaagtcaatgacttcgaaagtgccagaagccataacgttcttgggacggtcaagtttaggcggcttaaatcaacgtgatttaaagcgttgcctccgtttactaatattaccagagtacccggttacatctggcgatatatcagcattcagggctaactcaatctggagagattctggttcaacaagccaaatccttcatgagatagcaaacgcacttcgacgaaagtatggaattgctaaagagcaggacgtaccaaggtatctcagaccctggaaagcctaatcagcatccatacctcaatcgggggggaaggttccaatggaaccctct

SEQ ID NO: 573 - DNA, 500 bp, unidentified
  source 1..500: mol_type = other DNA
cgtattggatatttatggcgactaatgttcaatagagagcctaaactttgctacacgcaaggagacgactcattgattggtgatgacgaactaatccaaccagaaagactggctgaattagctgcaccattaaattggaacattaacccgaataagacagagtattctcgtactccagagtttatttcttttctaggacgaacatctagaggaggatttaacacaagagagcttgagaagtgcttacggttattaatctttcctgagcaccctgttccatcgggacggatttccgcatacagagcaaggtcgatcaatgaagacagtggctttaccagcgactatattcagaccgtcgctcgacgattaagaagacgctacggaatagctgaagaatcagaggttccgaagatgtttaaacgttacgttgttaggtaggtttaatgtatatcattattaagctttctatctaaaatgtaatagacttcttaacgggaggc

SEQ ID NO: 574 - DNA, 500 bp, Beet cryptic virus 3
  source 1..500: mol_type = other DNA
tcgaatatatatggagagtactattttcgagatcaccccatcggtgttacacccaaggtgacgattcattaatcggcgagacttttctcgttgaaccagaaacggtcgcccgcgaagcggcgaagtatggatggataatgaaccctgataagacagaatactctacagatccaggatatgtcacattcttaggaagaacggcacatggatttatgaacgctagatcactagacaaatgtctgagacttctaatgtttcctgagtaccctgtaacttcagggcggatttccgcctatagagcagagtcaattgcaagagattgcggaggacttagcgaggtaataaatctcgtagctcgtagattacgtagacaatacggagtagctagtgaggacgaagtcccacattactttaaacgttatgtagcttaattttgtttgtaatgaactcttttaataaacataataaagttctacggaaagggctatttaacccttacc

SEQ ID NO: 575 - DNA, 8853 bp, synthetic construct
  source 1..8853: mol_type = other DNA
taagtcgtcttcatcggcgggttataattacacaggcaggaaaggccttattggtgatgaaaatcactcaagggcaatttcgatagctaaagctgtattatggtcagccatcaaagatgatggagaaggcattgaacatgtcattcggacttcagtaccagacgttggctacactcgaactcagttaacggacttgctagaaaagacgaaagtcagacaagtttggggcagagcattccactatatcctacttgaaggattggttgcatacccgtttatacaaacagtcatgtcacataaaacgtttattcacgcaggacaagacccgttaattagtgttcctagattattatcagacgttgcattgaattgcaaatggatttactcacttgattggagtcaattcgacgctacagttagtcgattcgaaatccacgccgcttttgacataattaagtcttacgtagactttccaaattatgaaacagagcaggctttcgagatcactcgacaactattcatacataagaaagttgcagtacctgacggttacatctacgaatcacacaaaggaattccatctggaagttactacacttcacttgttggatcgattatcaattatttgagaatcaactacctctggagactcctcaccggacacccaccacaacagtgtcacactttaggagatgactcattggttggagataactcatatgttaatccacaagcgattgaagaagcagcaaacaagctaggctggcacttcaacccagataagactcaatactctacagtacctgaagagatcacatttctcggacgaacttacgtaggcggattaaataagagagatctaacgaaatgtattagattactcgtatatcccgaatacccagtagagtcaggtaaatcctggtccacacttttacgataaaaacacaagattttaaactatgaactgatcaataatcattcctaaaagaccacacttttgttttgtttctaaagtaatttttactgttataacaggtcgaatttcagcttatagagctaagtctatcgcacaagatgctggcggactcagcgaagtgctaaataggatagcagataagcttagacgtatttacggtacggcttcagaagaagaggtaccaatttattttaaacgctatgtatttggagtttaacgtaataaatacgtggaaggtatttaaaccttaccggccggcatggtcccagcctcctcgctggcgccggctgggcaacatgcttcggcatggcgaatgggacgcacctcgagtttctccataataatgtgtgagtagttcccagataagggaattagggttcctatagggtttcgctcatgtgttgagcatataagaaacccttagtatgtatttgtatttgtaaaatacttctatcaataaaatttctaattcctaaaaccaaaatccagtactaaaatccagatcccccgaattataaatccaaattaaactatcagtgtttgacaggatatattggcgggtaaacctaagagaaaagagcgtttattagaataacggatatttaaaagggcgtgaaaaggtttatccgttcgtccatttgtatgtgcatgccaaccacagggttcccctcgggatcaaagtactttgatccaacccctccgctgctatagtgcagtcggcttctgacgttcagtgcagccgtcttctgaaaacgacatgtcgcacaagtcctaagttacgcgacaggctgccgccctgcccttttcctggcgttttcttgtcgcgtgttttagtcgcataaagtagaatacttgcgactagaaccggagacattacgccatgaacaagagcgccgccgctggcctgctgggctatgcccgcgtcagcaccgacgaccaggacttgaccaaccaacgggccgaactgcacgcggccggctgcaccaagctgttttccgagaagatcaccggcaccaggcgcgaccgcccggagctggccaggatgcttgaccacctacgccctggcgacgttgtgacagtgaccaggctagaccgcctggcccgcagcacccgcgacctactggacattgccgagcgcatccaggaggccggcgcgggcctgcgtagcctggcagagccgtgggccgacaccaccacgccggccggccgcatggtgttgaccgtgttcgccggcattgccgagttcgagcgttccctaatcatcgaccgcacccggagcgggcgcgaggccgccaaggcccgaggcgtgaagtttggcccccgccctaccctcaccccggcacagatcgcgcacgcccgcgagctgatcgaccaggaaggccgcaccgtgaaagaggcggctgcactgcttggcgtgcatcgctcgaccctgtaccgcgcacttgagcgcagcgaggaagtgacgcccaccgaggccaggcggcgcggtgccttccgtgaggacgcattgaccgaggccgacgccctggcggccgccgagaatgaacgccaagaggaacaagcatgaaaccgcaccaggacggccaggacgaaccgtttttcattaccgaagagatcgaggcggagatgatcgcggccgggtacgtgttcgagccgcccgcgcacgtctcaaccgtgcggctgcatgaaatcctggccggtttgtctgatgccaagctggcggcctggccggccagcttggccgctgaagaaaccgagcgccgccgtctaaaaaggtgatgtgtatttgagtaaaacagcttgcgtcatgcggtcgctgcgtatatgatgcgatgagtaaataaacaaatacgcaaggggaacgcatgaaggttatcgctgtacttaaccagaaaggcgggtcaggcaagacgaccatcgcaacccatctagcccgcgccctgcaactcgccggggccgatgttctgttagtcgattccgatccccagggcagtgcccgcgattgggcggccgtgcgggaagatcaaccgctaaccgttgtcggcatcgaccgcccgacgattgaccgcgacgtgaaggccatcggccggcgcgacttcgtagtgatcgacggagcgccccaggcggcggacttggctgtgtccgcgatcaaggcagccgacttcgtgctgattccggtgcagccaagcccttacgacatatgggccaccgccgacctggtggagctggttaagcagcgcattgaggtcacggatggaaggctacaagcggcctttgtcgtgtcgcgggcgatcaaaggcacgcgcatcggcggtgaggttgccgaggcgctggccgggtacgagctgcccattcttgagtcccgtatcacgcagcgcgtgagctacccaggcactgccgccgccggcacaaccgttcttgaatcagaacccgagggcgacgctgcccgcgaggtccaggcgctggccgctgaaattaaatcaaaactcatttgagttaatgaggtaaagagaaaatgagcaaaagcacaaacacgctaagtgccggccgtccgagcgcacgcagcagcaaggctgcaacgttggccagcctggcagacacgccagccatgaagcgggtcaactttcagttgccggcggaggatcacaccaagctgaagatgtacgcggtacgccaaggcaagaccattaccgagctgctatctgaatacatcgcgcagctaccagagtaaatgagcaaatgaataaatgagtagatgaattttagcggctaaaggaggcggcatggaaaatcaagaacaaccaggcaccgacgccgtggaatgccccatgtgtggaggaacgggcggttggccaggcgtaagcggctgggttgtctgccggccctgcaatggcactggaacccccaagcccgaggaatcggcgtgacggtcgcaaaccatccggcccggtacaaatcggcgcggcgctgggtgatgacctggtggagaagttgaaggccgcgcaggccgcccagcggcaacgcatcgaggcagaagcacgccccggtgaatcgtggcaagcggccgctgatcgaatccgcaaagaatcccggcaaccgccggcagccggtgcgccgtcgattaggaagccgcccaagggcgacgagcaaccagattttttcgttccgatgctctatgacgtgggcacccgcgatagtcgcagcatcatggacgtggccgttttccgtctgtcgaagcgtgaccgacgagctggcgaggtgatccgctacgagcttccagacgggcacgtagaggtttccgcagggccggccggcatggccagtgtgtgggattacgacctggtactgatggcggtttcccatctaaccgaatccatgaaccgataccgggaagggaagggagacaagcccggccgcgtgttccgtccacacgttgcggacgtactcaagttctgccggcgagccgatggcggaaagcagaaagacgacctggtagaaacctgcattcggttaaacaccacgcacgttgccatgcagcgtacgaagaaggccaagaacggccgcctggtgacggtatccgagggtgaagccttgattagccgctacaagatcgtaaagagcgaaaccgggcggccggagtacatcgagatcgagctagctgattggatgtaccgcgagatcacagaaggcaagaacccggacgtgctgacggttcaccccgattactttttgatcgatcccggcatcggccgttttctctaccgcctggcacgccgcgccgcaggcaaggcagaagccagatggttgttcaagacgatctacgaacgcagtggcagcgccggagagttcaagaagttctgtttcaccgtgcgcaagctgatcgggtcaaatgacctgccggagtacgatttgaaggaggaggcggggcaggctggcccgatcctagtcatgcgctaccgcaacctgatcgagggcgaagcatccgccggttcctaatgtacggagcagatgctagggcaaattgccctagcaggggaaaaaggtcgaaaaggtctctttcctgtggatagcacgtacattgggaacccaaagccgtacattgggaaccggaacccgtacattgggaacccaaagccgtacattgggaaccggtcacacatgtaagtgactgatataaaagagaaaaaaggcgatttttccgcctaaaactctttaaaacttattaaaactcttaaaacccgcctggcctgtgcataactgtctggccagcgcacagccgaagagctgcaaaaagcgcctacccttcggtcgctgcgctccctacgccccgccgcttcgcgtcggcctatcgcggccgctggccgctcaaaaatggctggcctacggccaggcaatctaccagggcgcggacaagccgcgccgtcgccactcgaccgccggcgcccacatcaaggcaccctgcctcgcgcgtttcggtgatgacggtgaaaacctctgacacatgcagctcccggagacggtcacagcttgtctgtaagcggatgccgggagcagacaagcccgtcagggcgcgtcagcgggtgttggcgggtgtcggggcgcagccatgacccagtcacgtagcgatagcggagtgtatactggcttaactatgcggcatcagagcagattgtactgagagtgcaccatatgcggtgtgaaataccgcacagatgcgtaaggagaaaataccgcatcaggcgctcttccgcttcctcgctcactgactcgctgcgctcggtcgttcggctgcggcgagcggtatcagctcactcaaaggcggtaatacggttatccacagaatcaggggataacgcaggaaagaacatgtgagcaaaaggccagcaaaaggccaggaaccgtaaaaaggccgcgttgctggcgtttttccataggctccgcccccctgacgagcatcacaaaaatcgacgctcaagtcagaggtggcgaaacccgacaggactataaagataccaggcgtttccccctggaagctccctcgtgcgctctcctgttccgaccctgccgcttaccggatacctgtccgcctttctcccttcgggaagcgtggcgctttctcatagctcacgctgtaggtatctcagttcggtgtaggtcgttcgctccaagctgggctgtgtgcacgaaccccccgttcagcccgaccgctgcgccttatccggtaactatcgtcttgagtccaacccggtaagacacgacttatcgccactggcagcagccactggtaacaggattagcagagcgaggtatgtaggcggtgctacagagttcttgaagtggtggcctaactacggctacactagaaggacagtatttggtatctgcgctctgctgaagccagttaccttcggaaaaagagttggtagctcttgatccggcaaacaaaccaccgctggtagcggtggtttttttgtttgcaagcagcagattacgcgcagaaaaaaaggatctcaagaagatcctttgatcttttctacggggtctgacgctcagtggaacgaaaactcacgttaagggattttggtcatgcattctaggtactaaaacaattcatccagtaaaatataatattttattttctcccaatcaggcttgatccccagtaagtcaaaaaatagctcgacatactgttcttccccgatatcctccctgatcgaccggacgcagaaggcaatgtcataccacttgtccgccctgccgcttctcccaagatcaataaagccacttactttgccatctttcacaaagatgttgctgtctcccaggtcgccgtgggaaaagacaagttcctcttcgggcttttccgtctttaaaaaatcatacagctcgcgcggatctttaaatggagtgtcttcttcccagttttcgcaatccacatcggccagatcgttattcagtaagtaatccaattcggctaagcggctgtctaagctattcgtatagggacaatccgatatgtcgatggagtgaaagagcctgatgcactccgcatacagctcgataatcttttcagggctttgttcatcttcatactcttccgagcaaaggacgccatcggcctcactcatgagcagattgctccagccatcatgccgttcaaagtgcaggacctttggaacaggcagctttccttccagccatagcatcatgtccttttcccgttccacatcataggtggtccctttataccggctgtccgtcatttttaaatataggttttcattttctcccaccagcttatataccttagcaggagacattccttccgtatcttttacgcagcggtatttttcgatcagttttttcaattccggtgatattctcattttagccatttattatttccttcctcttttctacagtatttaaagataccccaagaagctaattataacaagacgaactccaattcactgttccttgcattctaaaaccttaaataccagaaaacagctttttcaaagttgttttcaaagttggcgtataacatagtatcgacggagccgattttgaaaccgcggtgatcacaggcagcaacgctctgtcatcgttacaatcaacatgctaccctccgcgagatcatccgtgtttcaaacccggcagcttagttgccgttcttccgaatagcatcggtaacatgagcaaagtctgccgccttacaacggctctcccgctgacgccgtcccggactgatgggctgcctgtatcgagtggtgattttgtgccgagctgccggtcggggagctgttggctggctggtggcaggatatattgtggtgtaaacaaattgacgcttagacaacttaataacacattgcggacgtttttaatgtactgaattaacgccgaatgcgaacagtatgctttacagaagaatcgagctggtaacagtatgctttacagaagaatcgagctagacctgatccaaaaatatcaaagatacagtctcagaagaccaaagggcaattgagacttttcaacaaagggtaatatccggaaacctcctcggattccattgcccagctatctgtcactttattgtgaagatagtggaaaaggaaggtggctcctacaaatgccatcattgcgataaaggaaaggccatcgttgaagatgcctctgccgacagtggtcccaaagatggacccccacccacgaggagcatcgtggaaaaagaagacgttccaaccacgtcttcaaagcaagtggattgatgtgatatctccactgacgtaagggatgacgcacaatcccactatccttcgcaagacccttcctctatataaggaagttcatttcatttggagaggaattctctgatgagtccgtgaggacgaaacgagtaagctcgtcagaatttcccccttgttccaaggcacctctcacgctccggtgccataaacaagagattgaaattaatcaatttatatacttacctcgttacgaatggtaagaggcacacttgttggttatgactatacccaatttcagggtgatttagttaaatcaactcaccgacaccctcatgttgttcaccgcgaaatcgcaacaacatatgtcgatcagtatgcttatgagcatattgaaacattcagtagtttatatcctgaacttatccttaaaggatggtctaggagttactatctgcccgagaagcatctcgctgcagtgttaaactacagtatgccaaatgttcctgcatctcagctcagtcagtcattatacagacaagcgattgaatcagctaagaatggatttattagccttccccgagtgaaggctttcgatgtacttaccgaaatggaccaagtaccttt

SEQ ID NO: 576 - DNA, 8797 bp, synthetic construct
  source 1..8797: mol_type = other DNA
gcgaacagtatgctttacagaagaatcgagctggtaacagtatgctttacagaagaatcgagctagacctgatccaaaaatatcaaagatacagtctcagaagaccaaagggcaattgagacttttcaacaaagggtaatatccggaaacctcctcggattccattgcccagctatctgtcactttattgtgaagatagtggaaaaggaaggtggctcctacaaatgccatcattgcgataaaggaaaggccatcgttgaagatgcctctgccgacagtggtcccaaagatggacccccacccacgaggagcatcgtggaaaaagaagacgttccaaccacgtcttcaaagcaagtggattgatgtgatatctccactgacgtaagggatgacgcacaatcccactatccttcgcaagacccttcctctatataaggaagttcatttcatttggagaggaattctctgatgagtccgtgaggacgaaacgagtaagctcgtcagaatttgacctgaaccccatatcaggatcgaattatttacaaattcaccaaacacgtctaagcttgtgaaaattattgttatccctacattaacatgggcgatcgtgttaacgctcaagacgacgatacagtcgtccctcaccaagcacctcttcaaccagcagctcttcagcaagacctcaccagatctgccgactacttattagacaacgtccgtattggcaaccaccgacaacgctatgataaataccgtcgctatgtccttctcagatccagcgaaatattcactagtctcgtcgccatttacgctcacatcttttctagttattggcaacactttcggaggttcactgatcaatttcaagctccaactggagtccaactccccacttttgtggcacgagtctacatctccacttggcttcatgatctatactgctctattcgagaggccactagaagtatttctccattagcctttaatgagaggtactcatatgaattgctcccatactccaccgagtacgacccctttctcgcatttctgtctatgtctattaaaccaacacatattcagcatactcccgagaacacattatggattcctatcctttgtgaaaattacgactgggatcgaaacgaagcaaatcacaacccttttggcattactaatttcacattgaatagtaacctattctatgggcttttagcgatactgaaagaacggaaggagtttaagttatcaactctgactactaatacaattggccgaccctgttggctctttgattggcacgacaacgtgcaagtctgcgcatggtttccccgtgaagcaaacttcaacagtcaagatgtaaccgccgcttacatcattggagtagcctgtactcccaaactaggacccagcgatgacgacgcatggaaatactatgcatccctcaactctgtaccaactttcacaccaactgagccgcgtctcaccaatcgtcggtcatacggtgcttatgaagtccgcactcgtgaaactgaaaataactatttcttaccagatagtcttctcaacatcatcgaggattttaccgcaacaggtaaatcctggtccacacttttacgataaaaacacaagattttaaactatgaactgatcaataatcattcctaaaagaccacacttttgttttgtttctaaagtaatttttactgttataacaggtacaacacaacgaaggaagatccgtcgcccttcagctacgtccgcgtctaccggagccgctatcattatcagagatacgcccggaacagcgtccactgcaaccacgtccactacggagacggaagttaccttccctccagtcatcaggactaagattagagactggtactaccactctcgtgtaattctagaacttgaagacaattctaggacagcagctttaagaatgtttatcattgcttaattagctttcctttatgcttttgtcatgttataaacaatttcgtttaattttaatattaatcgcagttaattttatacatgtgctctgttatttgatatcagttccgcataatggacaggctacaatacccttcagtagggtcacaaacgtgacccaggaagctgtattgcaccctgctggccggcatggtcccagcctcctcgctggcgccggctgggcaacatgcttcggcatggcgaatgggacgcacctcgagtttctccataataatgtgtgagtagttcccagataagggaattagggttcctatagggtttcgctcatgtgttgagcatataagaaacccttagtatgtatttgtatttgtaaaatacttctatcaataaaatttctaattcctaaaaccaaaatccagtactaaaatccagatcccccgaattataaatccaaattaaactatcagtgtttgacaggatatattggcgggtaaacctaagagaaaagagcgtttattagaataacggatatttaaaagggcgtgaaaaggtttatccgttcgtccatttgtatgtgcatgccaaccacagggttcccctcgggatcaaagtactttgatccaacccctccgctgctatagtgcagtcggcttctgacgttcagtgcagccgtcttctgaaaacgacatgtcgcacaagtcctaagttacgcgacaggctgccgccctgcccttttcctggcgttttcttgtcgcgtgttttagtcgcataaagtagaatacttgcgactagaaccggagacattacgccatgaacaagagcgccgccgctggcctgctgggctatgcccgcgtcagcaccgacgaccaggacttgaccaaccaacgggccgaactgcacgcggccggctgcaccaagctgttttccgagaagatcaccggcaccaggcgcgaccgcccggagctggccaggatgcttgaccacctacgccctggcgacgttgtgacagtgaccaggctagaccgcctggcccgcagcacccgcgacctactggacattgccgagcgcatccaggaggccggcgcgggcctgcgtagcctggcagagccgtgggccgacaccaccacgccggccggccgcatggtgttgaccgtgttcgccggcattgccgagttcgagcgttccctaatcatcgaccgcacccggagcgggcgcgaggccgccaaggcccgaggcgtgaagtttggcccccgccctaccctcaccccggcacagatcgcgcacgcccgcgagctgatcgaccaggaaggccgcaccgtgaaagaggcggctgcactgcttggcgtgcatcgctcgaccctgtaccgcgcacttgagcgcagcgaggaagtgacgcccaccgaggccaggcggcgcggtgccttccgtgaggacgcattgaccgaggccgacgccctggcggccgccgagaatgaacgccaagaggaacaagcatgaaaccgcaccaggacggccaggacgaaccgtttttcattaccgaagagatcgaggcggagatgatcgcggccgggtacgtgttcgagccgcccgcgcacgtctcaaccgtgcggctgcatgaaatcctggccggtttgtctgatgccaagctggcggcctggccggccagcttggccgctgaagaaaccgagcgccgccgtctaaaaaggtgatgtgtatttgagtaaaacagcttgcgtcatgcggtcgctgcgtatatgatgcgatgagtaaataaacaaatacgcaaggggaacgcatgaaggttatcgctgtacttaaccagaaaggcgggtcaggcaagacgaccatcgcaacccatctagcccgcgccctgcaactcgccggggccgatgttctgttagtcgattccgatccccagggcagtgcccgcgattgggcggccgtgcgggaagatcaaccgctaaccgttgtcggcatcgaccgcccgacgattgaccgcgacgtgaaggccatcggccggcgcgacttcgtagtgatcgacggagcgccccaggcggcggacttggctgtgtccgcgatcaaggcagccgacttcgtgctgattccggtgcagccaagcccttacgacatatgggccaccgccgacctggtggagctggttaagcagcgcattgaggtcacggatggaaggctacaagcggcctttgtcgtgtcgcgggcgatcaaaggcacgcgcatcggcggtgaggttgccgaggcgctggccgggtacgagctgcccattcttgagtcccgtatcacgcagcgcgtgagctacccaggcactgccgccgccggcacaaccgttcttgaatcagaacccgagggcgacgctgcccgcgaggtccaggcgctggccgctgaaattaaatcaaaactcatttgagttaatgaggtaaagagaaaatgagcaaaagcacaaacacgctaagtgccggccgtccgagcgcacgcagcagcaaggctgcaacgttggccagcctggcagacacgccagccatgaagcgggtcaactttcagttgccggcggaggatcacaccaagctgaagatgtacgcggtacgccaaggcaagaccattaccgagctgctatctgaatacatcgcgcagctaccagagtaaatgagcaaatgaataaatgagtagatgaattttagcggctaaaggaggcggcatggaaaatcaagaacaaccaggcaccgacgccgtggaatgccccatgtgtggaggaacgggcggttggccaggcgtaagcggctgggttgtctgccggccctgcaatggcactggaacccccaagcccgaggaatcggcgtgacggtcgcaaaccatccggcccggtacaaatcggcgcggcgctgggtgatgacctggtggagaagttgaaggccgcgcaggccgcccagcggcaacgcatcgaggcagaagcacgccccggtgaatcgtggcaagcggccgctgatcgaatccgcaaagaatcccggcaaccgccggcagccggtgcgccgtcgattaggaagccgcccaagggcgacgagcaaccagattttttcgttccgatgctctatgacgtgggcacccgcgatagtcgcagcatcatggacgtggccgttttccgtctgtcgaagcgtgaccgacgagctggcgaggtgatccgctacgagcttccagacgggcacgtagaggtttccgcagggccggccggcatggccagtgtgtgggattacgacctggtactgatggcggtttcccatctaaccgaatccatgaaccgataccgggaagggaagggagacaagcccggccgcgtgttccgtccacacgttgcggacgtactcaagttctgccggcgagccgatggcggaaagcagaaagacgacctggtagaaacctgcattcggttaaacaccacgcacgttgccatgcagcgtacgaagaaggccaagaacggccgcctggtgacggtatccgagggtgaagccttgattagccgctacaagatcgtaaagagcgaaaccgggcggccggagtacatcgagatcgagctagctgattggatgtaccgcgagatcacagaaggcaagaacccggacgtgctgacggttcaccccgattactttttgatcgatcccggcatcggccgttttctctaccgcctggcacgccgcgccgcaggcaaggcagaagccagatggttgttcaagacgatctacgaacgcagtggcagcgccggagagttcaagaagttctgtttcaccgtgcgcaagctgatcgggtcaaatgacctgccggagtacgatttgaaggaggaggcggggcaggctggcccgatcctagtcatgcgctaccgcaacctgatcgagggcgaagcatccgccggttcctaatgtacggagcagatgctagggcaaattgccctagcaggggaaaaaggtcgaaaaggtctctttcctgtggatagcacgtacattgggaacccaaagccgtacattgggaaccggaacccgtacattgggaacccaaagccgtacattgggaaccggtcacacatgtaagtgactgatataaaagagaaaaaaggcgatttttccgcctaaaactctttaaaacttattaaaactcttaaaacccgcctggcctgtgcataactgtctggccagcgcacagccgaagagctgcaaaaagcgcctacccttcggtcgctgcgctccctacgccccgccgcttcgcgtcggcctatcgcggccgctggccgctcaaaaatggctggcctacggccaggcaatctaccagggcgcggacaagccgcgccgtcgccactcgaccgccggcgcccacatcaaggcaccctgcctcgcgcgtttcggtgatgacggtgaaaacctctgacacatgcagctcccggagacggtcacagcttgtctgtaagcggatgccgggagcagacaagcccgtcagggcgcgtcagcgggtgttggcgggtgtcggggcgcagccatgacccagtcacgtagcgatagcggagtgtatactggcttaactatgcggcatcagagcagattgtactgagagtgcaccatatgcggtgtgaaataccgcacagatgcgtaaggagaaaataccgcatcaggcgctcttccgcttcctcgctcactgactcgctgcgctcggtcgttcggctgcggcgagcggtatcagctcactcaaaggcggtaatacggttatccacagaatcaggggataacgcaggaaagaacatgtgagcaaaaggccagcaaaaggccaggaaccgtaaaaaggccgcgttgctggcgtttttccataggctccgcccccctgacgagcatcacaaaaatcgacgctcaagtcagaggtggcgaaacccgacaggactataaagataccaggcgtttccccctggaagctccctcgtgcgctctcctgttccgaccctgccgcttaccggatacctgtccgcctttctcccttcgggaagcgtggcgctttctcatagctcacgctgtaggtatctcagttcggtgtaggtcgttcgctccaagctgggctgtgtgcacgaaccccccgttcagcccgaccgctgcgccttatccggtaactatcgtcttgagtccaacccggtaagacacgacttatcgccactggcagcagccactggtaacaggattagcagagcgaggtatgtaggcggtgctacagagttcttgaagtggtggcctaactacggctacactagaaggacagtatttggtatctgcgctctgctgaagccagttaccttcggaaaaagagttggtagctcttgatccggcaaacaaaccaccgctggtagcggtggtttttttgtttgcaagcagcagattacgcgcagaaaaaaaggatctcaagaagatcctttgatcttttctacggggtctgacgctcagtggaacgaaaactcacgttaagggattttggtcatgcattctaggtactaaaacaattcatccagtaaaatataatattttattttctcccaatcaggcttgatccccagtaagtcaaaaaatagctcgacatactgttcttccccgatatcctccctgatcgaccggacgcagaaggcaatgtcataccacttgtccgccctgccgcttctcccaagatcaataaagccacttactttgccatctttcacaaagatgttgctgtctcccaggtcgccgtgggaaaagacaagttcctcttcgggcttttccgtctttaaaaaatcatacagctcgcgcggatctttaaatggagtgtcttcttcccagttttcgcaatccacatcggccagatcgttattcagtaagtaatccaattcggctaagcggctgtctaagctattcgtatagggacaatccgatatgtcgatggagtgaaagagcctgatgcactccgcatacagctcgataatcttttcagggctttgttcatcttcatactcttccgagcaaaggacgccatcggcctcactcatgagcagattgctccagccatcatgccgttcaaagtgcaggacctttggaacaggcagctttccttccagccatagcatcatgtccttttcccgttccacatcataggtggtccctttataccggctgtccgtcatttttaaatataggttttcattttctcccaccagcttatataccttagcaggagacattccttccgtatcttttacgcagcggtatttttcgatcagttttttcaattccggtgatattctcattttagccatttattatttccttcctcttttctacagtatttaaagataccccaagaagctaattataacaagacgaactccaattcactgttccttgcattctaaaaccttaaataccagaaaacagctttttcaaagttgttttcaaagttggcgtataacatagtatcgacggagccgattttgaaaccgcggtgatcacaggcagcaacgctctgtcatcgttacaatcaacatgctaccctccgcgagatcatccgtgtttcaaacccggcagcttagttgccgttcttccgaatagcatcggtaacatgagcaaagtctgccgccttacaacggctctcccgctgacgccgtcccggactgatgggctgcctgtatcgagtggtgattttgtgccgagctgccggtcggggagctgttggctggctggtggcaggatatattgtggtgtaaacaaattgacgcttagacaacttaataacacattgcggacgtttttaatgtactgaattaacgccgaat

SEQ ID NO: 577 - DNA, 9251 bp, synthetic construct
  source 1..9251: mol_type = other DNA
gcgaacagtatgctttacagaagaatcgagctggtaacagtatgctttacagaagaatcgagctagacctgatccaaaaatatcaaagatacagtctcagaagaccaaagggcaattgagacttttcaacaaagggtaatatccggaaacctcctcggattccattgcccagctatctgtcactttattgtgaagatagtggaaaaggaaggtggctcctacaaatgccatcattgcgataaaggaaaggccatcgttgaagatgcctctgccgacagtggtcccaaagatggacccccacccacgaggagcatcgtggaaaaagaagacgttccaaccacgtcttcaaagcaagtggattgatgtgatatctccactgacgtaagggatgacgcacaatcccactatccttcgcaagacccttcctctatataaggaagttcatttcatttggagaggagttgtctgatgagtccgtgaggacgaaacgagtaagctcgtcacaactcctgctcaagcttttgacaatcaaaatagaacgtcaatctcagttgctctatctcaacttgttacctactctacatggattacctcacttccgcatttaaccgaatcactcattggttcaccaaacccaccaatttagaatacattggagactactctacacctcctagtatcatccgcgtcaatgaagttgctattgctaaccacaagaaaacacttcgctacgcctttgaacagtatctgtacgatcacgaataccgtatgatcgttgatgaatatcgtcgctcagacatagaccaagagtctatcctcgccgactttttctctggtgatattgaaccctttgatatacctttcgacgaacacgtcgaacatggactacgctgtatggccaacgccttcagacctcctagaccttgccgccctgctcacatcctagatgtcaagcacggatacccttacaaatggaacgtcaacgcagaaccacccttctcaactgacccttacttcctttctcaacgtaagacctttggcgagttcattcaaatgcacgaatatgaacacatcgataaagctgacttctttcgaagacatcccaacaccgaatcacacgacttcctcactacagtggtccctccaaaatttggatacctcaagtcgatggttttctcctggacccgaagatggcaccacgtcattaaaaccggattccaagacttaactggactcgaaaactctggatatctctacaatcgttttatctttcccatgctcctacacaccaaaactgctattgtcaaaaagaacgatcctaacaagatgcgcaccatctggggcgcccctaaaccttggatcatcgctgagacaatgctatattgggaatacatagcctggatcaaactcaactccggtaagacaccgatgctttggggatttgaaaccttcacaggtggatggtttcgtttgaacaacattttgttctgcggactcatcaaacaatccttcttaacattagactggtcacgcttcgacaagcgtgcctatttcagtcttctccgacggatcctttacacagctagaaccttcctcactttcgacgaaggctatgtcccaacacatgcagcaccgacccaccccaagtggaaccaccaaaaagcactcaaccttgagcgcctttggctctggacactcgagaacctctttgaggcacccatcatcctacctgatggccgaatgtacagacggcacttcgccggaattccttcaggtctatttatcacacaactattagactcttggtacaattacacgatgctagccacactcctaagcgcactgggcttcgaccctaaatattgtattattaaagtgcaaggcgacgactcaattatcaaattgacgaccttaattccacgtgaccaacacgagaacttcatggtccaactcaccgccctcgcaaccacgtactttaatgccaccatcaatgtcaagaagtcggaaatcagaaacacgctcaacggatgtgaagtcttatcatacaagaaccacaacggtttcccccaccgtgacgagatcactatgcttgctcaattctaccacaccaaagcacgtgacccaacgcctgaaattaccatggctcaagcaataggctttgcctatgccagctgcggcaacaacaaacgcgtactgtggattcttagagacatttacaacttttacaagatgcgtgacgtcacccctaatcgtgcaggtaaatcctggtccacacttttacgataaaaacacaagattttaaactatgaactgatcaataatcattcctaaaagaccacacttttgttttgtttctaaagtaatttttactgttataacaggtttaaccctcactttcggagactcaccagacgttttcatgcctgaaatccctcttgatcattttcctacaataactgaaattcggagatacctaacatgctctgaatatcgcaacgaagcacaagacgctagaacttggccgagatcactattcattagtggtcctgccgaataaagccgatcgctttgattgtttaaaattaaaaaaaaggccggcatggtcccagcctcctcgctggcgccggctgggcaacatgcttcggcatggcgaatgggacgcacctcgagtttctccataataatgtgtgagtagttcccagataagggaattagggttcctatagggtttcgctcatgtgttgagcatataagaaacccttagtatgtatttgtatttgtaaaatacttctatcaataaaatttctaattcctaaaaccaaaatccagtactaaaatccagatcccccgaattataaatccaaattaaactatcagtgtttgacaggatatattggcgggtaaacctaagagaaaagagcgtttattagaataacggatatttaaaagggcgtgaaaaggtttatccgttcgtccatttgtatgtgcatgccaaccacagggttcccctcgggatcaaagtactttgatccaacccctccgctgctatagtgcagtcggcttctgacgttcagtgcagccgtcttctgaaaacgacatgtcgcacaagtcctaagttacgcgacaggctgccgccctgcccttttcctggcgttttcttgtcgcgtgttttagtcgcataaagtagaatacttgcgactagaaccggagacattacgccatgaacaagagcgccgccgctggcctgctgggctatgcccgcgtcagcaccgacgaccaggacttgaccaaccaacgggccgaactgcacgcggccggctgcaccaagctgttttccgagaagatcaccggcaccaggcgcgaccgcccggagctggccaggatgcttgaccacctacgccctggcgacgttgtgacagtgaccaggctagaccgcctggcccgcagcacccgcgacctactggacattgccgagcgcatccaggaggccggcgcgggcctgcgtagcctggcagagccgtgggccgacaccaccacgccggccggccgcatggtgttgaccgtgttcgccggcattgccgagttcgagcgttccctaatcatcgaccgcacccggagcgggcgcgaggccgccaaggcccgaggcgtgaagtttggcccccgccctaccctcaccccggcacagatcgcgcacgcccgcgagctgatcgaccaggaaggccgcaccgtgaaagaggcggctgcactgcttggcgtgcatcgctcgaccctgtaccgcgcacttgagcgcagcgaggaagtgacgcccaccgaggccaggcggcgcggtgccttccgtgaggacgcattgaccgaggccgacgccctggcggccgccgagaatgaacgccaagaggaacaagcatgaaaccgcaccaggacggccaggacgaaccgtttttcattaccgaagagatcgaggcggagatgatcgcggccgggtacgtgttcgagccgcccgcgcacgtctcaaccgtgcggctgcatgaaatcctggccggtttgtctgatgccaagctggcggcctggccggccagcttggccgctgaagaaaccgagcgccgccgtctaaaaaggtgatgtgtatttgagtaaaacagcttgcgtcatgcggtcgctgcgtatatgatgcgatgagtaaataaacaaatacgcaaggggaacgcatgaaggttatcgctgtacttaaccagaaaggcgggtcaggcaagacgaccatcgcaacccatctagcccgcgccctgcaactcgccggggccgatgttctgttagtcgattccgatccccagggcagtgcccgcgattgggcggccgtgcgggaagatcaaccgctaaccgttgtcggcatcgaccgcccgacgattgaccgcgacgtgaaggccatcggccggcgcgacttcgtagtgatcgacggagcgccccaggcggcggacttggctgtgtccgcgatcaaggcagccgacttcgtgctgattccggtgcagccaagcccttacgacatatgggccaccgccgacctggtggagctggttaagcagcgcattgaggtcacggatggaaggctacaagcggcctttgtcgtgtcgcgggcgatcaaaggcacgcgcatcggcggtgaggttgccgaggcgctggccgggtacgagctgcccattcttgagtcccgtatcacgcagcgcgtgagctacccaggcactgccgccgccggcacaaccgttcttgaatcagaacccgagggcgacgctgcccgcgaggtccaggcgctggccgctgaaattaaatcaaaactcatttgagttaatgaggtaaagagaaaatgagcaaaagcacaaacacgctaagtgccggccgtccgagcgcacgcagcagcaaggctgcaacgttggccagcctggcagacacgccagccatgaagcgggtcaactttcagttgccggcggaggatcacaccaagctgaagatgtacgcggtacgccaaggcaagaccattaccgagctgctatctgaatacatcgcgcagctaccagagtaaatgagcaaatgaataaatgagtagatgaattttagcggctaaaggaggcggcatggaaaatcaagaacaaccaggcaccgacgccgtggaatgccccatgtgtggaggaacgggcggttggccaggcgtaagcggctgggttgtctgccggccctgcaatggcactggaacccccaagcccgaggaatcggcgtgacggtcgcaaaccatccggcccggtacaaatcggcgcggcgctgggtgatgacctggtggagaagttgaaggccgcgcaggccgcccagcggcaacgcatcgaggcagaagcacgccccggtgaatcgtggcaagcggccgctgatcgaatccgcaaagaatcccggcaaccgccggcagccggtgcgccgtcgattaggaagccgcccaagggcgacgagcaaccagattttttcgttccgatgctctatgacgtgggcacccgcgatagtcgcagcatcatggacgtggccgttttccgtctgtcgaagcgtgaccgacgagctggcgaggtgatccgctacgagcttccagacgggcacgtagaggtttccgcagggccggccggcatggccagtgtgtgggattacgacctggtactgatggcggtttcccatctaaccgaatccatgaaccgataccgggaagggaagggagacaagcccggccgcgtgttccgtccacacgttgcggacgtactcaagttctgccggcgagccgatggcggaaagcagaaagacgacctggtagaaacctgcattcggttaaacaccacgcacgttgccatgcagcgtacgaagaaggccaagaacggccgcctggtgacggtatccgagggtgaagccttgattagccgctacaagatcgtaaagagcgaaaccgggcggccggagtacatcgagatcgagctagctgattggatgtaccgcgagatcacagaaggcaagaacccggacgtgctgacggttcaccccgattactttttgatcgatcccggcatcggccgttttctctaccgcctggcacgccgcgccgcaggcaaggcagaagccagatggttgttcaagacgatctacgaacgcagtggcagcgccggagagttcaagaagttctgtttcaccgtgcgcaagctgatcgggtcaaatgacctgccggagtacgatttgaaggaggaggcggggcaggctggcccgatcctagtcatgcgctaccgcaacctgatcgagggcgaagcatccgccggttcctaatgtacggagcagatgctagggcaaattgccctagcaggggaaaaaggtcgaaaaggtctctttcctgtggatagcacgtacattgggaacccaaagccgtacattgggaaccggaacccgtacattgggaacccaaagccgtacattgggaaccggtcacacatgtaagtgactgatataaaagagaaaaaaggcgatttttccgcctaaaactctttaaaacttattaaaactcttaaaacccgcctggcctgtgcataactgtctggccagcgcacagccgaagagctgcaaaaagcgcctacccttcggtcgctgcgctccctacgccccgccgcttcgcgtcggcctatcgcggccgctggccgctcaaaaatggctggcctacggccaggcaatctaccagggcgcggacaagccgcgccgtcgccactcgaccgccggcgcccacatcaaggcaccctgcctcgcgcgtttcggtgatgacggtgaaaacctctgacacatgcagctcccggagacggtcacagcttgtctgtaagcggatgccgggagcagacaagcccgtcagggcgcgtcagcgggtgttggcgggtgtcggggcgcagccatgacccagtcacgtagcgatagcggagtgtatactggcttaactatgcggcatcagagcagattgtactgagagtgcaccatatgcggtgtgaaataccgcacagatgcgtaaggagaaaataccgcatcaggcgctcttccgcttcctcgctcactgactcgctgcgctcggtcgttcggctgcggcgagcggtatcagctcactcaaaggcggtaatacggttatccacagaatcaggggataacgcaggaaagaacatgtgagcaaaaggccagcaaaaggccaggaaccgtaaaaaggccgcgttgctggcgtttttccataggctccgcccccctgacgagcatcacaaaaatcgacgctcaagtcagaggtggcgaaacccgacaggactataaagataccaggcgtttccccctggaagctccctcgtgcgctctcctgttccgaccctgccgcttaccggatacctgtccgcctttctcccttcgggaagcgtggcgctttctcatagctcacgctgtaggtatctcagttcggtgtaggtcgttcgctccaagctgggctgtgtgcacgaaccccccgttcagcccgaccgctgcgccttatccggtaactatcgtcttgagtccaacccggtaagacacgacttatcgccactggcagcagccactggtaacaggattagcagagcgaggtatgtaggcggtgctacagagttcttgaagtggtggcctaactacggctacactagaaggacagtatttggtatctgcgctctgctgaagccagttaccttcggaaaaagagttggtagctcttgatccggcaaacaaaccaccgctggtagcggtggtttttttgtttgcaagcagcagattacgcgcagaaaaaaaggatctcaagaagatcctttgatcttttctacggggtctgacgctcagtggaacgaaaactcacgttaagggattttggtcatgcattctaggtactaaaacaattcatccagtaaaatataatattttattttctcccaatcaggcttgatccccagtaagtcaaaaaatagctcgacatactgttcttccccgatatcctccctgatcgaccggacgcagaaggcaatgtcataccacttgtccgccctgccgcttctcccaagatcaataaagccacttactttgccatctttcacaaagatgttgctgtctcccaggtcgccgtgggaaaagacaagttcctcttcgggcttttccgtctttaaaaaatcatacagctcgcgcggatctttaaatggagtgtcttcttcccagttttcgcaatccacatcggccagatcgttattcagtaagtaatccaattcggctaagcggctgtctaagctattcgtatagggacaatccgatatgtcgatggagtgaaagagcctgatgcactccgcatacagctcgataatcttttcagggctttgttcatcttcatactcttccgagcaaaggacgccatcggcctcactcatgagcagattgctccagccatcatgccgttcaaagtgcaggacctttggaacaggcagctttccttccagccatagcatcatgtccttttcccgttccacatcataggtggtccctttataccggctgtccgtcatttttaaatataggttttcattttctcccaccagcttatataccttagcaggagacattccttccgtatcttttacgcagcggtatttttcgatcagttttttcaattccggtgatattctcattttagccatttattatttccttcctcttttctacagtatttaaagataccccaagaagctaattataacaagacgaactccaattcactgttccttgcattctaaaaccttaaataccagaaaacagctttttcaaagttgttttcaaagttggcgtataacatagtatcgacggagccgattttgaaaccgcggtgatcacaggcagcaacgctctgtcatcgttacaatcaacatgctaccctccgcgagatcatccgtgtttcaaacccggcagcttagttgccgttcttccgaatagcatcggtaacatgagcaaagtctgccgccttacaacggctctcccgctgacgccgtcccggactgatgggctgcctgtatcgagtggtgattttgtgccgagctgccggtcggggagctgttggctggctggtggcaggatatattgtggtgtaaacaaattgacgcttagacaacttaataacacattgcggacgtttttaatgtactgaattaacgccgaat

SEQ ID NO: 578 - DNA, 8461 bp, synthetic construct
  source 1..8461: mol_type = other DNA
gcgaacagtatgctttacagaagaatcgagctggtaacagtatgctttacagaagaatcgagctagacctgatccaaaaatatcaaagatacagtctcagaagaccaaagggcaattgagacttttcaacaaagggtaatatccggaaacctcctcggattccattgcccagctatctgtcactttattgtgaagatagtggaaaaggaaggtggctcctacaaatgccatcattgcgataaaggaaaggccatcgttgaagatgcctctgccgacagtggtcccaaagatggacccccacccacgaggagcatcgtggaaaaagaagacgttccaaccacgtcttcaaagcaagtggattgatgtgatatctccactgacgtaagggatgacgcacaatcccactatccttcgcaagacccttcctctatataaggaagttcatttcatttggagaggttaatcctgatgagtccgtgaggacgaaacgagtaagctcgtcgattaacagccttcataacgctttttgcaatcaaaatagaacgcaaatctcagctgctctaactcaactttttacttactctactgcttacccaagccgcccacaccacaatggctctagttgttaaaggaaaagtgaatatcaatgagtttatcgacctgacaaaaatggagaagatcttaccgtcgatgtttacccctgtaaagagtgttatgtgttccaaagttgataaaataatggttcatgagaatgagtcattgtcagaggtgaaccttcttaaaggagttaagcttattgatagtggatacgtctgtttagccggtttggtcgtcacgggcgagtggaacttgcctgacaattgcagaggaggtaaatcctggtccacacttttacgataaaaacacaagattttaaactatgaactgatcaataatcattcctaaaagaccacacttttgttttgtttctaaagtaatttttactgttataacaggtgtgagcgtgtgtctggtggacaaaaggatggaaagagccgacgaggccactctcggatcttactacacagcagctgcaaagaaaagatttcagttcaaggtcgttcccaattatgctataaccacccaggacgcgatgaaaaacgtctggcaagttttagttaatattagaaatgtgaagatgtcagcgggtttctgtccgctttctctggagtttgtgtcggtgtgtattgtttatagaaataatataaaattaggtttgagagagaagattacaaacgtgagagacggagggcccatggaacttacagaagaagtcgttgatgagttcatggaagatgtccctatgtcgatcaggcttgcaaagtttcgatctcgaaccggaaaaaagagtgatgtccgcaaagggaaaaatagtagtaatgatcggtcagtgccgaacaagaactatagaaatgttaaggattttggaggaatgagttttaaaaagaataatttaatcgatgatgattcggaggctactgtcgccgaatcggattcgttttaagcatccatggctgaatggttaaagcgcccaactcataattggcgaattcgtaggttcaattcctactggatgcagtttggacccagaagtccttaaactctaacccattttgctgtcaaacagtctatctgattagaaagggttttttttgctttaacttaacttttatctttaattttctctttcctatactgattcctcgcttcctcccgaagcgtattcttggaagctcagcttccgacctaggaacaaaaaaaaaggccggcatggtcccagcctcctcgctggcgccggctgggcaacatgcttcggcatggcgaatgggacgcacctcgagtttctccataataatgtgtgagtagttcccagataagggaattagggttcctatagggtttcgctcatgtgttgagcatataagaaacccttagtatgtatttgtatttgtaaaatacttctatcaataaaatttctaattcctaaaaccaaaatccagtactaaaatccagatcccccgaattataaatccaaattaaactatcagtgtttgacaggatatattggcgggtaaacctaagagaaaagagcgtttattagaataacggatatttaaaagggcgtgaaaaggtttatccgttcgtccatttgtatgtgcatgccaaccacagggttcccctcgggatcaaagtactttgatccaacccctccgctgctatagtgcagtcggcttctgacgttcagtgcagccgtcttctgaaaacgacatgtcgcacaagtcctaagttacgcgacaggctgccgccctgcccttttcctggcgttttcttgtcgcgtgttttagtcgcataaagtagaatacttgcgactagaaccggagacattacgccatgaacaagagcgccgccgctggcctgctgggctatgcccgcgtcagcaccgacgaccaggacttgaccaaccaacgggccgaactgcacgcggccggctgcaccaagctgttttccgagaagatcaccggcaccaggcgcgaccgcccggagctggccaggatgcttgaccacctacgccctggcgacgttgtgacagtgaccaggctagaccgcctggcccgcagcacccgcgacctactggacattgccgagcgcatccaggaggccggcgcgggcctgcgtagcctggcagagccgtgggccgacaccaccacgccggccggccgcatggtgttgaccgtgttcgccggcattgccgagttcgagcgttccctaatcatcgaccgcacccggagcgggcgcgaggccgccaaggcccgaggcgtgaagtttggcccccgccctaccctcaccccggcacagatcgcgcacgcccgcgagctgatcgaccaggaaggccgcaccgtgaaagaggcggctgcactgcttggcgtgcatcgctcgaccctgtaccgcgcacttgagcgcagcgaggaagtgacgcccaccgaggccaggcggcgcggtgccttccgtgaggacgcattgaccgaggccgacgccctggcggccgccgagaatgaacgccaagaggaacaagcatgaaaccgcaccaggacggccaggacgaaccgtttttcattaccgaagagatcgaggcggagatgatcgcggccgggtacgtgttcgagccgcccgcgcacgtctcaaccgtgcggctgcatgaaatcctggccggtttgtctgatgccaagctggcggcctggccggccagcttggccgctgaagaaaccgagcgccgccgtctaaaaaggtgatgtgtatttgagtaaaacagcttgcgtcatgcggtcgctgcgtatatgatgcgatgagtaaataaacaaatacgcaaggggaacgcatgaaggttatcgctgtacttaaccagaaaggcgggtcaggcaagacgaccatcgcaacccatctagcccgcgccctgcaactcgccggggccgatgttctgttagtcgattccgatccccagggcagtgcccgcgattgggcggccgtgcgggaagatcaaccgctaaccgttgtcggcatcgaccgcccgacgattgaccgcgacgtgaaggccatcggccggcgcgacttcgtagtgatcgacggagcgccccaggcggcggacttggctgtgtccgcgatcaaggcagccgacttcgtgctgattccggtgcagccaagcccttacgacatatgggccaccgccgacctggtggagctggttaagcagcgcattgaggtcacggatggaaggctacaagcggcctttgtcgtgtcgcgggcgatcaaaggcacgcgcatcggcggtgaggttgccgaggcgctggccgggtacgagctgcccattcttgagtcccgtatcacgcagcgcgtgagctacccaggcactgccgccgccggcacaaccgttcttgaatcagaacccgagggcgacgctgcccgcgaggtccaggcgctggccgctgaaattaaatcaaaactcatttgagttaatgaggtaaagagaaaatgagcaaaagcacaaacacgctaagtgccggccgtccgagcgcacgcagcagcaaggctgcaacgttggccagcctggcagacacgccagccatgaagcgggtcaactttcagttgccggcggaggatcacaccaagctgaagatgtacgcggtacgccaaggcaagaccattaccgagctgctatctgaatacatcgcgcagctaccagagtaaatgagcaaatgaataaatgagtagatgaattttagcggctaaaggaggcggcatggaaaatcaagaacaaccaggcaccgacgccgtggaatgccccatgtgtggaggaacgggcggttggccaggcgtaagcggctgggttgtctgccggccctgcaatggcactggaacccccaagcccgaggaatcggcgtgacggtcgcaaaccatccggcccggtacaaatcggcgcggcgctgggtgatgacctggtggagaagttgaaggccgcgcaggccgcccagcggcaacgcatcgaggcagaagcacgccccggtgaatcgtggcaagcggccgctgatcgaatccgcaaagaatcccggcaaccgccggcagccggtgcgccgtcgattaggaagccgcccaagggcgacgagcaaccagattttttcgttccgatgctctatgacgtgggcacccgcgatagtcgcagcatcatggacgtggccgttttccgtctgtcgaagcgtgaccgacgagctggcgaggtgatccgctacgagcttccagacgggcacgtagaggtttccgcagggccggccggcatggccagtgtgtgggattacgacctggtactgatggcggtttcccatctaaccgaatccatgaaccgataccgggaagggaagggagacaagcccggccgcgtgttccgtccacacgttgcggacgtactcaagttctgccggcgagccgatggcggaaagcagaaagacgacctggtagaaacctgcattcggttaaacaccacgcacgttgccatgcagcgtacgaagaaggccaagaacggccgcctggtgacggtatccgagggtgaagccttgattagccgctacaagatcgtaaagagcgaaaccgggcggccggagtacatcgagatcgagctagctgattggatgtaccgcgagatcacagaaggcaagaacccggacgtgctgacggttcaccccgattactttttgatcgatcccggcatcggccgttttctctaccgcctggcacgccgcgccgcaggcaaggcagaagccagatggttgttcaagacgatctacgaacgcagtggcagcgccggagagttcaagaagttctgtttcaccgtgcgcaagctgatcgggtcaaatgacctgccggagtacgatttgaaggaggaggcggggcaggctggcccgatcctagtcatgcgctaccgcaacctgatcgagggcgaagcatccgccggttcctaatgtacggagcagatgctagggcaaattgccctagcaggggaaaaaggtcgaaaaggtctctttcctgtggatagcacgtacattgggaacccaaagccgtacattgggaaccggaacccgtacattgggaacccaaagccgtacattgggaaccggtcacacatgtaagtgactgatataaaagagaaaaaaggcgatttttccgcctaaaactctttaaaacttattaaaactcttaaaacccgcctggcctgtgcataactgtctggccagcgcacagccgaagagctgcaaaaagcgcctacccttcggtcgctgcgctccctacgccccgccgcttcgcgtcggcctatcgcggccgctggccgctcaaaaatggctggcctacggccaggcaatctaccagggcgcggacaagccgcgccgtcgccactcgaccgccggcgcccacatcaaggcaccctgcctcgcgcgtttcggtgatgacggtgaaaacctctgacacatgcagctcccggagacggtcacagcttgtctgtaagcggatgccgggagcagacaagcccgtcagggcgcgtcagcgggtgttggcgggtgtcggggcgcagccatgacccagtcacgtagcgatagcggagtgtatactggcttaactatgcggcatcagagcagattgtactgagagtgcaccatatgcggtgtgaaataccgcacagatgcgtaaggagaaaataccgcatcaggcgctcttccgcttcctcgctcactgactcgctgcgctcggtcgttcggctgcggcgagcggtatcagctcactcaaaggcggtaatacggttatccacagaatcaggggataacgcaggaaagaacatgtgagcaaaaggccagcaaaaggccaggaaccgtaaaaaggccgcgttgctggcgtttttccataggctccgcccccctgacgagcatcacaaaaatcgacgctcaagtcagaggtggcgaaacccgacaggactataaagataccaggcgtttccccctggaagctccctcgtgcgctctcctgttccgaccctgccgcttaccggatacctgtccgcctttctcccttcgggaagcgtggcgctttctcatagctcacgctgtaggtatctcagttcggtgtaggtcgttcgctccaagctgggctgtgtgcacgaaccccccgttcagcccgaccgctgcgccttatccggtaactatcgtcttgagtccaacccggtaagacacgacttatcgccactggcagcagccactggtaacaggattagcagagcgaggtatgtaggcggtgctacagagttcttgaagtggtggcctaactacggctacactagaaggacagtatttggtatctgcgctctgctgaagccagttaccttcggaaaaagagttggtagctcttgatccggcaaacaaaccaccgctggtagcggtggtttttttgtttgcaagcagcagattacgcgcagaaaaaaaggatctcaagaagatcctttgatcttttctacggggtctgacgctcagtggaacgaaaactcacgttaagggattttggtcatgcattctaggtactaaaacaattcatccagtaaaatataatattttattttctcccaatcaggcttgatccccagtaagtcaaaaaatagctcgacatactgttcttccccgatatcctccctgatcgaccggacgcagaaggcaatgtcataccacttgtccgccctgccgcttctcccaagatcaataaagccacttactttgccatctttcacaaagatgttgctgtctcccaggtcgccgtgggaaaagacaagttcctcttcgggcttttccgtctttaaaaaatcatacagctcgcgcggatctttaaatggagtgtcttcttcccagttttcgcaatccacatcggccagatcgttattcagtaagtaatccaattcggctaagcggctgtctaagctattcgtatagggacaatccgatatgtcgatggagtgaaagagcctgatgcactccgcatacagctcgataatcttttcagggctttgttcatcttcatactcttccgagcaaaggacgccatcggcctcactcatgagcagattgctccagccatcatgccgttcaaagtgcaggacctttggaacaggcagctttccttccagccatagcatcatgtccttttcccgttccacatcataggtggtccctttataccggctgtccgtcatttttaaatataggttttcattttctcccaccagcttatataccttagcaggagacattccttccgtatcttttacgcagcggtatttttcgatcagttttttcaattccggtgatattctcattttagccatttattatttccttcctcttttctacagtatttaaagataccccaagaagctaattataacaagacgaactccaattcactgttccttgcattctaaaaccttaaataccagaaaacagctttttcaaagttgttttcaaagttggcgtataacatagtatcgacggagccgattttgaaaccgcggtgatcacaggcagcaacgctctgtcatcgttacaatcaacatgctaccctccgcgagatcatccgtgtttcaaacccggcagcttagttgccgttcttccgaatagcatcggtaacatgagcaaagtctgccgccttacaacggctctcccgctgacgccgtcccggactgatgggctgcctgtatcgagtggtgattttgtgccgagctgccggtcggggagctgttggctggctggtggcaggatatattgtggtgtaaacaaattgacgcttagacaacttaataacacattgcggacgtttttaatgtactgaattaacgccgaat

SEQ ID NO: 579 - DNA, 9047 bp, synthetic construct
  source 1..9047: mol_type = other DNA
gcgaacagtatgctttacagaagaatcgagctggtaacagtatgctttacagaagaatcgagctagacctgatccaaaaatatcaaagatacagtctcagaagaccaaagggcaattgagacttttcaacaaagggtaatatccggaaacctcctcggattccattgcccagctatctgtcactttattgtgaagatagtggaaaaggaaggtggctcctacaaatgccatcattgcgataaaggaaaggccatcgttgaagatgcctctgccgacagtggtcccaaagatggacccccacccacgaggagcatcgtggaaaaagaagacgttccaaccacgtcttcaaagcaagtggattgatgtgatatctccactgacgtaagggatgacgcacaatcccactatccttcgcaagacccttcctctatataaggaagttcatttcatttggagaggttaatcctgatgagtccgtgaggacgaaacgagtaagctcgtcgattaacagccttcataacgctttttgcaatcaaaatagaacgcaaatctcagctgctctaactcaactttttacttactctactgcttacccaagccgcccacaccacaatgaatcctgaaacaccacttgccgaccccaacggtcccaccccacctcacggtgctgctgcccaacccacccctggccaacacatccctgctggaactccctccactggtgctgtccacttgacaccagccccgcaacccaagcgcaaccgcgcgccccgtggcccgttcgacaatgcctcgagcacctctgctcctggagctcctgctttactggagcttgctgctgcctaccccatgtccacggaacaaaggcgttccccaaacaccttcgtccctgacgcccagatgcttttccatgtcctcagcttatgcgacaacatgatgctgtctaccgaccgtttcacccgctctgctcccgcctggctccccatcgtctcgcagctttacatttccatcctttggttcaccatgattctcaaagtgtatgtcaactcctcctatggagccatgcacgctcacctcctgaatatcttagtcgcccatcttcgtatagatgagtgccttattcctggacctctcgtcccattcttccaatctcttggagccattaacggcccttttgaatggatcggagacatagtgccgatcatccccgaattttctcagctttggaacaccacatcgttctaccccactgactcattcgctcgcatcttccccatccctgctatcctcctcgatcaactgcactactttgcctccatcacagtcaccgaacaagaaaccattttcggtcactttgaatggtacagaaacattttctctctcggccaaggcaccttcaacccccgccttcgcctaggcccgcaactctgtggctccctctatgccaccgaatctcaggtaaatcctggtccacacttttacgataaaaacacaagattttaaactatgaactgatcaataatcattcctaaaagaccacacttttgttttgtttctaaagtaatttttactgttataacaggtcaccaacgctcgcactttttggagcgctgccctccgcaccgggataacccgcaccaatgccgcagctaatcaacctctttttagctcctaccctcaactccttggtttcgtcgaccagaacgacgctatgcagctggactggttccagcacacagccatagtcatgcagaagtactgtcagtacttcaatggctccgttcccctcaaatcaatcagccccactggcatcggcgctgtcgccgttcacggctaccccaactacagcggtgctgctcgcacctggatgtaccctgctaccaacaccctctcctcattcaagtctagccgcttctccgccctcagagaaatccctgctctcctcaccgttaggttcgagcatgctgatcacgagcttgaagaacaagccgaacagtatgccattgccacacatactaacatgtgctggtctaagaaccttacaacccagaacaactggactcaagtagctgaagccaatgtgcactcaggcacttactggtctatgacccctcatcgggcacacgcctctgtaaggctgaagacacaatacgcccagctcgtggcctcccgttatcaccaacaggctgccaaccgtgtctaagtttggacccagaagtccttaaactctaacccattttgctgtcaaacagtctatctgattagaaagggttttttttgctttaacttaacttttatctttaattttctctttcctatactgattcctcgcttcctcccgaagcgtattcttggaagctcagcttccgacctaggaacaaaaaaaaaggccggcatggtcccagcctcctcgctggcgccggctgggcaacatgcttcggcatggcgaatgggacgcacctcgagtttctccataataatgtgtgagtagttcccagataagggaattagggttcctatagggtttcgctcatgtgttgagcatataagaaacccttagtatgtatttgtatttgtaaaatacttctatcaataaaatttctaattcctaaaaccaaaatccagtactaaaatccagatcccccgaattataaatccaaattaaactatcagtgtttgacaggatatattggcgggtaaacctaagagaaaagagcgtttattagaataacggatatttaaaagggcgtgaaaaggtttatccgttcgtccatttgtatgtgcatgccaaccacagggttcccctcgggatcaaagtactttgatccaacccctccgctgctatagtgcagtcggcttctgacgttcagtgcagccgtcttctgaaaacgacatgtcgcacaagtcctaagttacgcgacaggctgccgccctgcccttttcctggcgttttcttgtcgcgtgttttagtcgcataaagtagaatacttgcgactagaaccggagacattacgccatgaacaagagcgccgccgctggcctgctgggctatgcccgcgtcagcaccgacgaccaggacttgaccaaccaacgggccgaactgcacgcggccggctgcaccaagctgttttccgagaagatcaccggcaccaggcgcgaccgcccggagctggccaggatgcttgaccacctacgccctggcgacgttgtgacagtgaccaggctagaccgcctggcccgcagcacccgcgacctactggacattgccgagcgcatccaggaggccggcgcgggcctgcgtagcctggcagagccgtgggccgacaccaccacgccggccggccgcatggtgttgaccgtgttcgccggcattgccgagttcgagcgttccctaatcatcgaccgcacccggagcgggcgcgaggccgccaaggcccgaggcgtgaagtttggcccccgccctaccctcaccccggcacagatcgcgcacgcccgcgagctgatcgaccaggaaggccgcaccgtgaaagaggcggctgcactgcttggcgtgcatcgctcgaccctgtaccgcgcacttgagcgcagcgaggaagtgacgcccaccgaggccaggcggcgcggtgccttccgtgaggacgcattgaccgaggccgacgccctggcggccgccgagaatgaacgccaagaggaacaagcatgaaaccgcaccaggacggccaggacgaaccgtttttcattaccgaagagatcgaggcggagatgatcgcggccgggtacgtgttcgagccgcccgcgcacgtctcaaccgtgcggctgcatgaaatcctggccggtttgtctgatgccaagctggcggcctggccggccagcttggccgctgaagaaaccgagcgccgccgtctaaaaaggtgatgtgtatttgagtaaaacagcttgcgtcatgcggtcgctgcgtatatgatgcgatgagtaaataaacaaatacgcaaggggaacgcatgaaggttatcgctgtacttaaccagaaaggcgggtcaggcaagacgaccatcgcaacccatctagcccgcgccctgcaactcgccggggccgatgttctgttagtcgattccgatccccagggcagtgcccgcgattgggcggccgtgcgggaagatcaaccgctaaccgttgtcggcatcgaccgcccgacgattgaccgcgacgtgaaggccatcggccggcgcgacttcgtagtgatcgacggagcgccccaggcggcggacttggctgtgtccgcgatcaaggcagccgacttcgtgctgattccggtgcagccaagcccttacgacatatgggccaccgccgacctggtggagctggttaagcagcgcattgaggtcacggatggaaggctacaagcggcctttgtcgtgtcgcgggcgatcaaaggcacgcgcatcggcggtgaggttgccgaggcgctggccgggtacgagctgcccattcttgagtcccgtatcacgcagcgcgtgagctacccaggcactgccgccgccggcacaaccgttcttgaatcagaacccgagggcgacgctgcccgcgaggtccaggcgctggccgctgaaattaaatcaaaactcatttgagttaatgaggtaaagagaaaatgagcaaaagcacaaacacgctaagtgccggccgtccgagcgcacgcagcagcaaggctgcaacgttggccagcctggcagacacgccagccatgaagcgggtcaactttcagttgccggcggaggatcacaccaagctgaagatgtacgcggtacgccaaggcaagaccattaccgagctgctatctgaatacatcgcgcagctaccagagtaaatgagcaaatgaataaatgagtagatgaattttagcggctaaaggaggcggcatggaaaatcaagaacaaccaggcaccgacgccgtggaatgccccatgtgtggaggaacgggcggttggccaggcgtaagcggctgggttgtctgccggccctgcaatggcactggaacccccaagcccgaggaatcggcgtgacggtcgcaaaccatccggcccggtacaaatcggcgcggcgctgggtgatgacctggtggagaagttgaaggccgcgcaggccgcccagcggcaacgcatcgaggcagaagcacgccccggtgaatcgtggcaagcggccgctgatcgaatccgcaaagaatcccggcaaccgccggcagccggtgcgccgtcgattaggaagccgcccaagggcgacgagcaaccagattttttcgttccgatgctctatgacgtgggcacccgcgatagtcgcagcatcatggacgtggccgttttccgtctgtcgaagcgtgaccgacgagctggcgaggtgatccgctacgagcttccagacgggcacgtagaggtttccgcagggccggccggcatggccagtgtgtgggattacgacctggtactgatggcggtttcccatctaaccgaatccatgaaccgataccgggaagggaagggagacaagcccggccgcgtgttccgtccacacgttgcggacgtactcaagttctgccggcgagccgatggcggaaagcagaaagacgacctggtagaaacctgcattcggttaaacaccacgcacgttgccatgcagcgtacgaagaaggccaagaacggccgcctggtgacggtatccgagggtgaagccttgattagccgctacaagatcgtaaagagcgaaaccgggcggccggagtacatcgagatcgagctagctgattggatgtaccgcgagatcacagaaggcaagaacccggacgtgctgacggttcaccccgattactttttgatcgatcccggcatcggccgttttctctaccgcctggcacgccgcgccgcaggcaaggcagaagccagatggttgttcaagacgatctacgaacgcagtggcagcgccggagagttcaagaagttctgtttcaccgtgcgcaagctgatcgggtcaaatgacctgccggagtacgatttgaaggaggaggcggggcaggctggcccgatcctagtcatgcgctaccgcaacctgatcgagggcgaagcatccgccggttcctaatgtacggagcagatgctagggcaaattgccctagcaggggaaaaaggtcgaaaaggtctctttcctgtggatagcacgtacattgggaacccaaagccgtacattgggaaccggaacccgtacattgggaacccaaagccgtacattgggaaccggtcacacatgtaagtgactgatataaaagagaaaaaaggcgatttttccgcctaaaactctttaaaacttattaaaactcttaaaacccgcctggcctgtgcataactgtctggccagcgcacagccgaagagctgcaaaaagcgcctacccttcggtcgctgcgctccctacgccccgccgcttcgcgtcggcctatcgcggccgctggccgctcaaaaatggctggcctacggccaggcaatctaccagggcgcggacaagccgcgccgtcgccactcgaccgccggcgcccacatcaaggcaccctgcctcgcgcgtttcggtgatgacggtgaaaacctctgacacatgcagctcccggagacggtcacagcttgtctgtaagcggatgccgggagcagacaagcccgtcagggcgcgtcagcgggtgttggcgggtgtcggggcgcagccatgacccagtcacgtagcgatagcggagtgtatactggcttaactatgcggcatcagagcagattgtactgagagtgcaccatatgcggtgtgaaataccgcacagatgcgtaaggagaaaataccgcatcaggcgctcttccgcttcctcgctcactgactcgctgcgctcggtcgttcggctgcggcgagcggtatcagctcactcaaaggcggtaatacggttatccacagaatcaggggataacgcaggaaagaacatgtgagcaaaaggccagcaaaaggccaggaaccgtaaaaaggccgcgttgctggcgtttttccataggctccgcccccctgacgagcatcacaaaaatcgacgctcaagtcagaggtggcgaaacccgacaggactataaagataccaggcgtttccccctggaagctccctcgtgcgctctcctgttccgaccctgccgcttaccggatacctgtccgcctttctcccttcgggaagcgtggcgctttctcatagctcacgctgtaggtatctcagttcggtgtaggtcgttcgctccaagctgggctgtgtgcacgaaccccccgttcagcccgaccgctgcgccttatccggtaactatcgtcttgagtccaacccggtaagacacgacttatcgccactggcagcagccactggtaacaggattagcagagcgaggtatgtaggcggtgctacagagttcttgaagtggtggcctaactacggctacactagaaggacagtatttggtatctgcgctctgctgaagccagttaccttcggaaaaagagttggtagctcttgatccggcaaacaaaccaccgctggtagcggtggtttttttgtttgcaagcagcagattacgcgcagaaaaaaaggatctcaagaagatcctttgatcttttctacggggtctgacgctcagtggaacgaaaactcacgttaagggattttggtcatgcattctaggtactaaaacaattcatccagtaaaatataatattttattttctcccaatcaggcttgatccccagtaagtcaaaaaatagctcgacatactgttcttccccgatatcctccctgatcgaccggacgcagaaggcaatgtcataccacttgtccgccctgccgcttctcccaagatcaataaagccacttactttgccatctttcacaaagatgttgctgtctcccaggtcgccgtgggaaaagacaagttcctcttcgggcttttccgtctttaaaaaatcatacagctcgcgcggatctttaaatggagtgtcttcttcccagttttcgcaatccacatcggccagatcgttattcagtaagtaatccaattcggctaagcggctgtctaagctattcgtatagggacaatccgatatgtcgatggagtgaaagagcctgatgcactccgcatacagctcgataatcttttcagggctttgttcatcttcatactcttccgagcaaaggacgccatcggcctcactcatgagcagattgctccagccatcatgccgttcaaagtgcaggacctttggaacaggcagctttccttccagccatagcatcatgtccttttcccgttccacatcataggtggtccctttataccggctgtccgtcatttttaaatataggttttcattttctcccaccagcttatataccttagcaggagacattccttccgtatcttttacgcagcggtatttttcgatcagttttttcaattccggtgatattctcattttagccatttattatttccttcctcttttctacagtatttaaagataccccaagaagctaattataacaagacgaactccaattcactgttccttgcattctaaaaccttaaataccagaaaacagctttttcaaagttgttttcaaagttggcgtataacatagtatcgacggagccgattttgaaaccgcggtgatcacaggcagcaacgctctgtcatcgttacaatcaacatgctaccctccgcgagatcatccgtgtttcaaacccggcagcttagttgccgttcttccgaatagcatcggtaacatgagcaaagtctgccgccttacaacggctctcccgctgacgccgtcccggactgatgggctgcctgtatcgagtggtgattttgtgccgagctgccggtcggggagctgttggctggctggtggcaggatatattgtggtgtaaacaaattgacgcttagacaacttaataacacattgcggacgtttttaatgtactgaattaacgccgaat

SEQ ID NO: 580 - DNA, 1708 bp, White clover cryptic virus 1
  source 1..1708: mol_type = other DNA
gttttaacttaagcttttcgtaatcaaaatagaacgcgaatctcaactgctctacctcaactttttacctactctaccgctaacttagccgccctacccacaagatgaatcaagacactcctctcgccaatctcaatggccccgaagttccatccggcaacgtccctcccgccaaccctcctggtcgaacaaacgtcgcccctcccgcccaaggtgctgttcaacagcctcctgctccggctgctcgtcgtgcccgcaacccacacggccctgtccctcctgctggaccatcccgttctgctggtgcccctgctatgcttgaactttccgctgcctaccctatgtacaccgaacaacgtcgtgcacccaactactatgtgcctgacgcacaacttctcttccacaccctcggtgtctgcgaccaactgatgaccacaactgaccgcttcctccgctccatgccttcatggttgccaatcgtctctcagctttacgtctctgtcctttggaatgttatgatactcaaggtctatgtcaacaccggttacggtgctgcctacgcacatgacttggatgtcctcctcaaccaccttcaaattaacgaatgtatgatccctggccccctcgtcccctttttccaatccctcgctgccgtcaatggcccttttgactggataggtgatattattcctgccatgccatcattcactgaactctggactgatgaatttgctccccatgctgcttacgctaggcaaatacccatacctgccatcctccttgatcagctttaccgttttgccactcttgcctttgatgctcaactacaaacaaactatgccacttttgaatggtatagcaacattttcaaccaagatgtcaacactcacaatgctcgtctccgcctcggccctcaactctgtggctctctgttcacaacacaagcccagtgtgactccgcccgcgccttctggaacccagcttttgctaatgggtttactagaatcgatgctgctaatggccccctaatggcttttccccaactacttggatttatttctcaagatggtgccctgcaatctaactggttcatgcacatctccttaatcatgcacaagtacgctcagtacttcaatggttctgtaccccttaagtccatctcccctgttggaattggtgcttccgtgatctacggaactccgcttgaagataccaacgtccgtgactggctctaccccgctgctgctgctattgctcctttccgttctacccgctttttaccgcgtcgtgaactacctgcgaccctagctgtccgtttcgcccatgccgatcatgagatcgaagaacaagctgaacagtattccatactgtgtcacaccaatatgaagtggtatgtcaacaacgccactcagaacaaccacacagctattgaaggaaactacattcaccaaggtgagtactggaacttcacccctttccgctactctcctcctgtctctctgaagacccagtttgctcaagtgatcgcttcccgctaccaccaacaagctgccaaccgtgctgaatgattcctccgacctttgatgtcgttaatctcaccaattttgctgcctaagtgcagttaatctgatcagattggattttttttgttttaactttcttttaatcaactttatccttttaattctgacctattatcgctcttgcg

SEQ ID NO: 581 - DNA, 1779 bp, Vicia cryptic virus
  source 1..1779: mol_type = other DNA
gatcaaaagagtaacagtccttgtaccaacttttcacaatcaaaatagaacgcgaatcttgactgctctacctcaactttttacttactttaacgttgtttatcaaccgtccctctcaatggaagctcatactcccgctgctgatgtcaatggacccaatatcccctccggtgctgtctctcagccagaaatcgctccacacaatcaagctgcccccaacgtctctggtgctgctcaggctataatagcccccacccctgctcgtaagcgcacgcctcacggacccattcctgctgccacctcatctggcaacacctctgctcctgctctcctggaattagctgctgcttatcccatgtacaccgagcaacgccgttcattcaactttttcatcccagactcccaaatgatgtttcactctttaggtatctgcgactcaatgatgaactccaccgatcgttttcttcgatcctcacccgcttggctccccatcgtttcacaactttacatctctgtactgtggaatgttatgattatccgcatcctctctcacactggatatgccccttccttcaccgatctactcaatactctcactactgaccttcaaattgaagagtgtatggtccccggaccactagtccccttcttccaatccttggcctctaccaatggcccttttgactggataggcgatatcactcctgccctccctggatttgattctctctgggatgccacgaatttcactccgcacgcaagctacacccgcttcgtccccattcctgccatcttgttagaccagctttactactgcgcgacttacgtcggcgttaatcaaggcgacctctaccctaccttcacttggtatagaaacattttcacccgcactggtgcaaacactcctgctctcctccgcatgggcccaaatctttgtggctcacttttcaccacctccaatcaattcgatgctgcccgtacttattggcgcgcctgctttggcactggttttacccgtgttaatgtcaccgctgctgccttcaccaactacctacagctgttaggtctccgttcccaaactggagaaccgcagactgcctggttccagaatgtgaccatggttatgcagaaatatgcacaacacttcaatggttccgttcccctcaagagtatcgacctcactggcattggcgccgtcgcccttaccggcacaccagttaataatactgctgtccgcgactggctctatcctccaaatgccaatatcgaaccgttcaccactggtcgattcaaccctcgtcgtgaaatcccggcccaactccgcatccgcttttctcactccgatcatgaactcgaactccaagctgaacagtacgctattgctgcgcacaccaacattaggtgggctgctaacatagctacacaacatgaaaggaccgccatcaatccggctcatcttcaccaaggtgattactggaacatgacccctttccgtcacaccggacatctcggcctcaagactcagtatgcccagctcatcgcttctcgctatcaccaacttgccgccaaccgtgtcgactgacaacctcctgacctagaacgtcaataaacttctaattttgctatctttgatagttattctgatcagaatagttttttgtttttttccaactcccaacttagttttctttaatacaaatttttatcctctctgacattttgttcgcccaaagtaaaaaaaaaaaaaaaaaaaaaaaaaaaaaaaaggaaaaaaaagtt

SEQ ID NO: 582 - DNA, 1791 bp, unidentified
  source 1..1791: mol_type = other DNA
agaaaaattttagaacctactctaattgatttttctaagctttatttcttttcctctgaaaaccaactttcaacataatggctcatcgtactcccactaatgccccggctcttcctcaagttgatgggatcaaccccaaccttccccccaacgacccaggaaccgtcgccgccgcccctaatgctaggaacttgcatctcgaaagagaacaagaagctagacaagaccgcgccgccgccgccttcgtccccaacactcgctttgcggtgagaagaccgacgattcgcccctccccggcccactctgcccctgacctagagactgctctctttgattcagccgtcaaccacccccccaccccggtctcctatccgtctacctcatcctacatccccaacttcacttccgccttctactatctcaacaagatggactccttgatggtccaaactctcaactggacaaacaactgctctggatgggttcccccatactcccagatctacatcagcatgcttctctatcttcaagtaatgcgcgccatgaagaaagctggcgtcctcaggcccaactctgaactatcccatctcttcaatgagatgtccacaatctttcctttcgaaagtctgatggttcccggccccctcgtcaacttattcgagaatatcactgcctttcgtcctcttcaaacggactcttttggcaatgtgactcccttccttccagccgaacccggttggtcaaacgcgaccttcttcgctcccaacggctcattagttcgacacctccctcacatacccgctttaatctcccgtctccggagaatttgcgaaaccgcttccgagaatggcttaaatgacatctcgttttccgcccaccaccacggcccggagttcatatcagaactttttggccacatttgtgacaacgatcttcctgaacagctactgctgctcacccctggcctggccacctcctactctggtacactctacctctggcgccaagcccgctctcaactacaaaggtccctcttccctgaggcactcactgtcaacgacgtagtgcccaatacgtggacctccttcctctgcctggacaatgatgattcatggttcagtcccctcgccgctatgatgaacaagtactgccaatattggcatggctcagctcccctctcctccatccccgctgatggatccgctgctggctcaatgatttgcaatgagctcaatggatcctctatttaccggctggctcaatggaccgctcctattatggacccccccgctgacgaggatgccccacctgtcattgccgaacctggctactactaccccaatcccaaccccgtcctcatctttgacgctcgtacctgcattgaagacatctcttctgcacacatgttctccgctatgaccttccatcccaatctcataccatacggagctaacagagctaactttctgaaaggacagttttggaattgccaccccccaagctacagcgctcctgcccaccaggtctatccagctgtatccgcccttatcgctcgtgagtatcacagtgaaactaacctttcatctgacaagtgactctctcgacacccccgacacccctctcgctgatgacgaagatgtgaccggagtagacgctagcgcgttccttcggaatttttcggttcttttgttttgtcgttagctacgactttttcttatttcaatgtaaaccctacctattagctatcttttaaattaaaagaaaaaaaaattaaaaaaaaaaaataaaacc

SEQ ID NO: 583 - DNA, 1465 bp, unidentified
  source 1..1465: mol_type = other DNA
gataatgatcctgggaaagatcgttattattttactagtgtaaatttcttaaagagcttttcttcaaggtaattttcactttctcactttccccttagatgttatctaagcttgccttgttataataatttataactctactagtatgtttactatcttactttcgtagatatggctagcccacgtgactctatgatgacgactgctcaagacgctaagaaacgtaaagtttctcatattttgagtccgattcgaatgatcgagcctgctgctcaatccctcgcaatcatcccagttgtccctcaagtccaaatggatgacgctgaagctatggctgaattgctgtatcgtgaacgcgcccgcattgaacttgatattaatcctgcttatatcagtagattggaatcccgtcgagagattggtttctatcctcctgttgcaagtaagaacgttccgttcactactttcaacatcgatgtcgctgaattcagacgctgcataacacatgtacttactgctgcactcaaagtacgttattacgatcgatcaaatcttcgcaacgctgagatcaatactgagataaacacgattgtgcctcgcactgtgtctgcatgcatgtgtgccgtttacgctaaactgcgctcaatacatcgcacccacggtaccctccggaataggtatgtcactactcctacttacaataaggatattgaactgccccttcctttagctatcgctatacaaggtctaggtgccttccgcactgaaagcattctcgcaaaccgagttatcgctccgacctaccctgaggccacccagtatgaaggacgcgctcaagacgctttcaacatgactgagtaccagaactacatcccaactcttaaagatcttggtatcccctgtaaatcagtggaaatccatgacaagaagggaaccgcttggtggagttacaaaatccacaacgaccacggtacatcagatctcgtctgcctgcttcctcctacaaactactctccgcttgctgttgcaacccgaatgctcttcctcgctactcaggacgattctgacgaatgtactgattttatcgaatggccagaagatctcggtgattatggaacacagctgaaagaagccccacccaactccaatgttcgtgcatttcttgccttatgccatggacccctagaagaatggagcaatggacatgcttaaatatttatttatttatggtcatgtaataataacacaacccctaagttttgctgaactcttaagttctacttgattttacaatcgctaagaactaccttatatttatttatttgtgtatttctcttaaacgctgatacttttacgtatcacatcccgcacacacacacgggatggtgatgtgttatcttctagacggacttatcgtcaatgacgataatctcctactagaaggtacacagcaccctctcatatc

SEQ ID NO: 584 - DNA, 1955 bp, White clover cryptic virus 1
  source 1..1955: mol_type = other DNA
cttgtacacactttttgcaatcaaaatagaacgcaaatcttgactgctctacctcaacttaatacctactctacatggattacctaatcactgcatttaaccgaatcactcactggttcttaactccaactaatctcgaatacatcggatcctactcccttccccctgggcttcttcgcgtaaatgatgttgctgtcgcaaatcataaagctaccttagatcgctcgtttgacaagtatctctatgaacatgagataaatcttatcactaaagagtaccgccgatctcctattgatgaagactctatacttgaggacttcttctcaggtgacctaccttatttcgaaatccctttcgacgaacacgtcgaacgtggactggaatgtatggctgccgcctttcggccgcctagaccctgtcgccctgctcacatcttagatgtgaaacatggatacccttacaaatggaacgtcaatgccgaacctcccttctccactgatgaatatttcctatcacaacgtaagacattcggtgaatttatacgaatgcatgaatatgaacacattgataaagaagatttcttccgtcgtcatcccaacattgagtcccatgactttctacgcacagtcgtcccaccaaaatttggctttttgaagtcaatgatattttcgtggacccgtcgctggcatcacataatcaagtctggattccaagactctactgacctggaacaaaccggctatttctttaaccgctttatctttcccatgctactacataccaaaactgctattgtcaagaaaaacgaccctaacaagatgcgcaccatatggggcgcttccaaaccatggatcatcgctgaaacgatgttctactgggaataccttgcttggatcaaacacaatcctggtgctacaccaatgctctggggttacgaaaccttcacaggtggctggttcagactgaaccatgaactattctgtggacttatccaacgatcctttctaactttggactggtcacgctttgataaaagagcgtactttcctctgctacgtcgaatcttgtacactgtaaagactttccttacttttgaagaaggatacgtccctactcacgcagctcccactcacccacagtggagtcaagagaacatcgatagacttgaacgtctctggctgtggactctcgaaaacctttttgaggctccaatcatcttacctgacggtcggatgtacagaagacactttgctggaataccttccggcttgtttattacccaactcttagactcctggtataattatactatgctcgccaccattctgagcgcgcttcatttcgatcccttacactgtattattaaagtgcaaggtgacgattctatacttcgtttaactactctgattcctgttgaccaacacacaaactttatggatcacatcgtcagactagccgatacatatttcaattcaattgtcaatgtcaagaagtctgaagttcgcaactcccttaatggatgcgaagtactctcctaccgtaaccacaacggcctacctcatcgtgatgagatcactatgctagcccagttctaccacactaaggctagagatcccacacctgagataaccatggcacaagccataggctttgcttacgccagttgcgccaatcacaaccgcgtactctgggtactagaagatgtatataattattatcgtgacttaggctacaggcctaatcgtgctggtttgactctcacctttggagactcaccggaccttaccatgcctgaaatgcctcttgatcattttccaactaaatctgaaattcggcgttaccacaccgaaacccactatcagaacgaagcacagaacgctcggacttggcctagaacattgtttatcaatgctccaggcgagtaaaaagccgatcgctttgtttgtttctttttt

SEQ ID NO: 585 - DNA, 2012 bp, Vicia cryptic virus
  source 1..2012: mol_type = other DNA
gatcaaaagagtaacagctcttgccacgcttttcgcaatcaaaatagaacacgaatctcagctgctctacctcaactttttacttactctacatggattacctcatttccgctttcaaccgaatcactcactggttcatcactccgaccaatttcgagtacatcgggtacttctcccttccccccggccttctccgtgtcaatgacgtcgctatcgcgaatcataaatgcacacttgaacgatctttccacacctatctctttgatcacgaaatcaaaagaataatgatagatcatcgccgctcagacatcacagaagattctattttagaagacttcttcgctggtgacttcccctacttcgaagtacctttcgacgaacacgtcgaatatggtttacagtgtatggcagacgccttccgtccgccccgaccttgccgccctgctcacatcttagatgttaagcacggttacccttacaaatggaacgtcaacgcagaattcccgttctcaactgacgaatatttccttacacaacgtaagacatttggcgagttcatccgaatgcacgaatatgaacatatcgataaagacgacttcttccgtcgccatcccaacttggagtctcacgactttctgcgtaccatcgtccctcccaaatttggttacctcaaatcaaccatcttctcttggacacgccgctggcaccacatcatcaagctcggattcaccgacacaacaggactcgacaacaatggttacctctataaccgctttatctttcccatgctcctacacaccaaaactgctattgtcaagaaagacgaccccaacaagatgcgaaccatctggggcgcttccaaaccctggatcatcgctgacacgatgttctactgggaataccaagcctgggtcaaacacaaccccggctcaacacccatgctctggggcttcgaaaccttcactggaggctggttcagattgaaccaactactcttctgtgggctaattcgtcgctcattcataacattggactggtcacgtttcgataaacgagcgtactttcctttgctacgcaagatcatgtataccgtaaaatcctttctcacctttgaagaaggttacgtaccgacacacgcagctcccaaccacccacaatggaatcaagacaaaactgacaaactcgaaagactctggctctggacactcgaaaatttattcgaagctccaatcatcctgcctgacggccgaatgtacagacgtcactttgctggaataccttccggcttattcatcactcagcttttggactcatggtataactataccatgctagcaaccattctacacgctttaggcttcaacccaagtaactgcattatcaaagtgcaaggcgatgattcaatcatccgcctcaacgttctcgtaccctccgaacgccatgaccatctcatgtcccgcatcgtcgagctcgctgaatactactttaactcaattgttaatgtcaagaagtccgagatccgtaatagactaaatggctgtgaagtactttcctaccgtaatcacaacggcctaccattccgcgatgagatcgcaatgctagctcagttctaccacactaaagctagagatcccactcccgaaattacaatggctcaagccataggcttcgcttacgcaagttgcgctacacatacacgcgtactttgggtcctcgaagatatatataactattatcgcgatcaaggatacacgcccaaccgtgctggcctcaccctcacattcggtgattctccagatctcactatgcctgagatgccccttgaccactttccaactaagtccgaaatagtgcgctacctaacatgcactaattatcggaatgaagcacaaaacgcccgcacttggccgagaacattgttcatcaatgctcccgccgagtaaagccgatcgctttgtttgtttctttttaattaaaataaaaaaaaaaaaaaaaaacaaaaaaaaattgcc

SEQ ID NO: 586 - DNA, 1734 bp, unidentified
  source 1..1734: mol_type = other DNA
gataatgatcaaccgaaaaggttgattttcattatctagaagtaaattttctattgtaaattttcattatgaaattaacattagaagttacttctacacactaccgtgtatagcgagtttataagatttcaaattttagagttatctaattgtttactatcttacatccgttatatacaggtatggagcatcgctttcgtggaatccctcgtggtcttatagaactcgaagaaatcccgacgcgacgcttacgcgaggagcgcgttgtacatatagacgcctggagctcaaaagctatagacgccatcgtaccgctctcacttcgcatcgaactagatggctgggcccgaagttattatacacttcaagcgcacattgattcaatcatgcaatatgatcgtccaaagctgccgcaacccaccaatgctgcgtggaacaccaccacacaacacgtccgaacacagttcgcacggatggataaagtacagactctgtcttacttacaacttgaccaagttaaatgggtcagatcctccgccgctggttatggttacgttggtcgcaaaagcgataatgataactattttagagctcgaaagactgctttcactatagcagaaaagctcaaccacgatcgcgactacggtccgctagctctcgaagactctacacctgacatagcgttcacacgaacacaactatgccaaatcaaggtgaagagaaagattaggaatgtttggggagaggcgtttcattacgtcctacttgaaggtctgttcgcagatcccattattcagcactttatacggaacaagtcgttctactttattggagaagacccgctgcttgctgtcccccgcctagtcgagaagatattatcagaacaagactacgtctacatgtttgactggtctggtttcgatgcctcagtacaagaatgggaaattcgttttgccttttcgttacttgagagtatcctgatctttccctcaagtgtcgaatcttacatttggcatttcattattgagctgttcatctaccgcaagatagccgcacccaatggcaaggtataccttaaaactttaggaataccatctggtagctgtttcacgaacattattggaagtatcgttaactacgttcgcatccagtatctgttcttccgactcaccaacaacttcgtaactgttttcacacacggtgacgatagcctggtcggagtatcaactactcaatacgttcagatggacaattttgaacccatctgtgctgaacacaattggacgattaacatcgccaaatctgctgtctcgcatgaagctgaaggggtatccttcttaagccgaaaagtccgtgagcactgccatgcccgtgacgaattactctgccttcgaatgctcaaatttccagaatacgtcgtagaatctggcgcaatgtcaactttgcgtgcacattccattcaccaagacgctggaatcaattcccgttacttgtattcaatatacaaataccttttacacaggtacggaaaagctgactccctgcctctgaaccaacagaactgggaccctctagagtacgagaacctacgtgtttcttttgctactcaaaactatgaataatgtaatgatgtttatcaatacactgtttgttgtcaaccaaccgaatattttatgtatttaaatttacatagaatgtgggttaggagcctgatcactcctaacccctctgatc

SEQ ID NO: 587 - DNA, 1717 bp, unidentified
  source 1..1717: mol_type = other DNA
gataatgatctattagagatcattatcataggttttagttagaaattctaggttgcttgtgtgtgaaaactatagtacctgttgagtatctaaccactacccttctgttttgcaggttaggtaaaatttttaagttttaacgcgaagatttttcaccgtaccagcgcgaaactagaagatggaccacgagttcaggaagattcgtgaaggtctcatagagatcggcacagtttcccttcgtgtccaaagagacgagtttaaggtcatcattgatgaatatgccgcagaagctgttttcaagtttgttccttcaactatgctctcacaactccagggttgggccagaagtgtttactcactagatcaacatgttgatgccatacttgcgtatcgtcgtcaaaagttgcctgagccgacagatgatgtttggaaccaaaccaaacaacacaccttgcaattgttccgaagattccccaagatcacaccgatctcgtacaagtcgtttgacgaagtaaagtggatatcttcatcctccgccggttatggttacgtcggtcacaaaggtgacggtgacaattacctcaaagcgagaaggaccgcagtgacgatcgctgaaaagctcgatcacgacaggaactacgcacctgaagctattaaccagtctacacctgacgttgcttttacaagaacgcaactctctcaagtcaaagtgaagaccaaggttagaaatgtatggggtgaagcgtttcattacgttttgctggaaggcctttttgccgacccattgatcaacttcttctccaacgaagaatctttctactttataggaagaaatccgttgctcagtgtacctacattaatcgaggaaatcttcaaatccaaggactacgtatatgcgttcgattggtccgggtttgatgcctccgttcaagaatgggaaatccgtttcgcctttcaatgtctggagtcacagctgatatttccttcaaatgtcgaagcccagatctggcgtttcatcgttgagctgttcatctaccggaagattgccgccccaaacggcaccctatttctgaagaccttaggtatcccctctggtagctgttttaccaacatgattggtagcgtcgtcaactacgtccgcatccaatacatgttcaagaagttaactgatgactttgtcgaagcctacactcatggagatgatagtctagctgccgtcagtaccgctcaatacataccgctcgagaagttcggacccatatgcgaaccgtttatgtggagtatcaatactctaaagtctgaagtctcacgtgaaggtagacttactacctttctcagtcgatcgatccgcgataagcaaaactaccgtgacgaattcgtttgcctgcgtatgctcgtgtatcccgaatacgaagtggaagatggaagcatctcagccctccgtgccaaaagcatctatgtcgatgccggaatacattcccaatacttgtaccatgttttcttgtatttgaaacaaaaatatggattagccaataccctccctcacaacctgaggacctgggaccccacagaacatgaagctcttagagcttcttattctaatatcatgtaacactatttaataagttactctttctcaataaaagtttaaaatttaaattgtgctgcgtgtactattacagtagtaataagttcatgcagtacaataacaaatgtc

SEQ ID NO: 588 - protein, 487 aa, White clover cryptic virus 1
MNQDTPLANLNGPEVPSGNVPPANPPGRTNVAPPAQGAVQQPPAPAARRARNPHGPVPPAGPSRSAGAPAMLELSAAYPMYTEQRRAPNYYVPDAQLLFHTLGVCDQLMTTTDRFLRSMPSWLPIVSQLYVSVLWNVMILKVYVNTGYGAAYAHDLDVLLNHLQINECMIPGPLVPFFQSLAAVNGPFDWIGDIIPAMPSFTELWTDEFAPHAAYARQIPIPAILLDQLYRFATLAFDAQLQTNYATFEWYSNIFNQDVNTHNARLRLGPQLCGSLFTTQAQCDSARAFWNPAFANGFTRIDAANGPLMAFPQLLGFISQDGALQSNWFMHISLIMHKYAQYFNGSVPLKSISPVGIGASVIYGTPLEDTNVRDWLYPAAAAIAPFRSTRFLPRRELPATLAVRFAHADHEIEEQAEQYSILCHTNMKWYVNNATQNNHTAIEGNYIHQGEYWNFTPFRYSPPVSLKTQFAQVIASRYHQQAANRAE

SEQ ID NO: 589 - protein, 487 aa, Vicia cryptic virus
MEAHTPAADVNGPNIPSGAVSQPEIAPHNQAAPNVSGAAQAIIAPTPARKRTPHGPIPAATSSGNTSAPALLELAAAYPMYTEQRRSFNFFIPDSQMMFHSLGICDSMMNSTDRFLRSSPAWLPIVSQLYISVLWNVMIIRILSHTGYAPSFTDLLNTLTTDLQIEECMVPGPLVPFFQSLASTNGPFDWIGDITPALPGFDSLWDATNFTPHASYTRFVPIPAILLDQLYYCATYVGVNQGDLYPTFTWYRNIFTRTGANTPALLRMGPNLCGSLFTTSNQFDAARTYWRACFGTGFTRVNVTAAAFTNYLQLLGLRSQTGEPQTAWFQNVTMVMQKYAQHFNGSVPLKSIDLTGIGAVALTGTPVNNTAVRDWLYPPNANIEPFTTGRFNPRREIPAQLRIRFSHSDHELELQAEQYAIAAHTNIRWAANIATQHERTAINPAHLHQGDYWNMTPFRHTGHLGLKTQYAQLIASRYHQLAANRVD

SEQ ID NO: 590 - protein, 505 aa, unidentified
MAHRTPTNAPALPQVDGINPNLPPNDPGTVAAAPNARNLHLEREQEARQDRAAAAFVPNTRFAVRRPTIRPSPAHSAPDLETALFDSAVNHPPTPVSYPSTSSYIPNFTSAFYYLNKMDSLMVQTLNWTNNCSGWVPPYSQIYISMLLYLQVMRAMKKAGVLRPNSELSHLFNEMSTIFPFESLMVPGPLVNLFENITAFRPLQTDSFGNVTPFLPAEPGWSNATFFAPNGSLVRHLPHIPALISRLRRICETASENGLNDISFSAHHHGPEFISELFGHICDNDLPEQLLLLTPGLATSYSGTLYLWRQARSQLQRSLFPEALTVNDVVPNTWTSFLCLDNDDSWFSPLAAMMNKYCQYWHGSAPLSSIPADGSAAGSMICNELNGSSIYRLAQWTAPIMDPPADEDAPPVIAEPGYYYPNPNPVLIFDARTCIEDISSAHMFSAMTFHPNLIPYGANRANFLKGQFWNCHPPSYSAPAHQVYPAVSALIAREYHSETNLSSDK

SEQ ID NO: 591 - protein, 346 aa, unidentified
MASPRDSMMTTAQDAKKRKVSHILSPIRMIEPAAQSLAIIPVVPQVQMDDAEAMAELLYRERARIELDINPAYISRLESRREIGFYPPVASKNVPFTTFNIDVAEFRRCITHVLTAALKVRYYDRSNLRNAEINTEINTIVPRTVSACMCAVYAKLRSIHRTHGTLRNRYVTTPTYNKDIELPLPLAIAIQGLGAFRTESILANRVIAPTYPEATQYEGRAQDAFNMTEYQNYIPTLKDLGIPCKSVEIHDKKGTAWWSYKIHNDHGTSDLVCLLPPTNYSPLAVATRMLFLATQDDSDECTDFIEWPEDLGDYGTQLKEAPPNSNVRAFLALCHGPLEEWSNGHA

SEQ ID NO: 592 - protein, 616 aa, White clover cryptic virus 1
MDYLITAFNRITHWFLTPTNLEYIGSYSLPPGLLRVNDVAVANHKATLDRSFDKYLYEHEINLITKEYRRSPIDEDSILEDFFSGDLPYFEIPFDEHVERGLECMAAAFRPPRPCRPAHILDVKHGYPYKWNVNAEPPFSTDEYFLSQRKTFGEFIRMHEYEHIDKEDFFRRHPNIESHDFLRTVVPPKFGFLKSMIFSWTRRWHHIIKSGFQDSTDLEQTGYFFNRFIFPMLLHTKTAIVKKNDPNKMRTIWGASKPWIIAETMFYWEYLAWIKHNPGATPMLWGYETFTGGWFRLNHELFCGLIQRSFLTLDWSRFDKRAYFPLLRRILYTVKTFLTFEEGYVPTHAAPTHPQWSQENIDRLERLWLWTLENLFEAPIILPDGRMYRRHFAGIPSGLFITQLLDSWYNYTMLATILSALHFDPLHCIIKVQGDDSILRLTTLIPVDQHTNFMDHIVRLADTYFNSIVNVKKSEVRNSLNGCEVLSYRNHNGLPHRDEITMLAQFYHTKARDPTPEITMAQAIGFAYASCANHNRVLWVLEDVYNYYRDLGYRPNRAGLTLTFGDSPDLTMPEMPLDHFPTKSEIRRYHTETHYQNEAQNARTWPRTLFINAPGE

SEQ ID NO: 593 - protein, 616 aa, Vicia cryptic virus
MDYLISAFNRITHWFITPTNFEYIGYFSLPPGLLRVNDVAIANHKCTLERSFHTYLFDHEIKRIMIDHRRSDITEDSILEDFFAGDFPYFEVPFDEHVEYGLQCMADAFRPPRPCRPAHILDVKHGYPYKWNVNAEFPFSTDEYFLTQRKTFGEFIRMHEYEHIDKDDFFRRHPNLESHDFLRTIVPPKFGYLKSTIFSWTRRWHHIIKLGFTDTTGLDNNGYLYNRFIFPMLLHTKTAIVKKDDPNKMRTIWGASKPWIIADTMFYWEYQAWVKHNPGSTPMLWGFETFTGGWFRLNQLLFCGLIRRSFITLDWSRFDKRAYFPLLRKIMYTVKSFLTFEEGYVPTHAAPNHPQWNQDKTDKLERLWLWTLENLFEAPIILPDGRMYRRHFAGIPSGLFITQLLDSWYNYTMLATILHALGFNPSNCIIKVQGDDSIIRLNVLVPSERHDHLMSRIVELAEYYFNSIVNVKKSEIRNRLNGCEVLSYRNHNGLPFRDEIAMLAQFYHTKARDPTPEITMAQAIGFAYASCATHTRVLWVLEDIYNYYRDQGYTPNRAGLTLTFGDSPDLTMPEMPLDHFPTKSEIVRYLTCTNYRNEAQNARTWPRTLFINAPAE

SEQ ID NO: 594 - protein, 479 aa, unidentified
MEHRFRGIPRGLIELEEIPTRRLREERVVHIDAWSSKAIDAIVPLSLRIELDGWARSYYTLQAHIDSIMQYDRPKLPQPTNAAWNTTTQHVRTQFARMDKVQTLSYLQLDQVKWVRSSAAGYGYVGRKSDNDNYFRARKTAFTIAEKLNHDRDYGPLALEDSTPDIAFTRTQLCQIKVKRKIRNVWGEAFHYVLLEGLFADPIIQHFIRNKSFYFIGEDPLLAVPRLVEKILSEQDYVYMFDWSGFDASVQEWEIRFAFSLLESILIFPSSVESYIWHFIIELFIYRKIAAPNGKVYLKTLGIPSGSCFTNIIGSIVNYVRIQYLFFRLTNNFVTVFTHGDDSLVGVSTTQYVQMDNFEPICAEHNWTINIAKSAVSHEAEGVSFLSRKVREHCHARDELLCLRMLKFPEYVVESGAMSTLRAHSIHQDAGINSRYLYSIYKYLLHRYGKADSLPLNQQNWDPLEYENLRVSFATQNYE

SEQ ID NO: 595 - protein, 477 aa, unidentified
MDHEFRKIREGLIEIGTVSLRVQRDEFKVIIDEYAAEAVFKFVPSTMLSQLQGWARSVYSLDQHVDAILAYRRQKLPEPTDDVWNQTKQHTLQLFRRFPKITPISYKSFDEVKWISSSSAGYGYVGHKGDGDNYLKARRTAVTIAEKLDHDRNYAPEAINQSTPDVAFTRTQLSQVKVKTKVRNVWGEAFHYVLLEGLFADPLINFFSNEESFYFIGRNPLLSVPTLIEEIFKSKDYVYAFDWSGFDASVQEWEIRFAFQCLESQLIFPSNVEAQIWRFIVELFIYRKIAAPNGTLFLKTLGIPSGSCFTNMIGSVVNYVRIQYMFKKLTDDFVEAYTHGDDSLAAVSTAQYIPLEKFGPICEPFMWSINTLKSEVSREGRLTTFLSRSIRDKQNYRDEFVCLRMLVYPEYEVEDGSISALRAKSIYVDAGIHSQYLYHVFLYLKQKYGLANTLPHNLRTWDPTEHEALRASYSNIM

SEQ ID NO: 596 - protein, 479 aa, unidentified
MEHRFRGIPRGLIELEEIPTRRLREECVIHIDAWSSQAIDAIVPLSLRNELDGWARSYYTLQAHVDSLMQYDRPKLQPPTNTAWNITTQYIRTEFARMKKVTALSYLQLDQVKWVRSSAAGYGYTGRKSDGDNYIRARKTAFTLAEKLNHNRDYGPLALEDSTPDVAFTRTQLCQIKVKRKIRNVWGEAFHYVLLEGLFADPLIQQFMRIKSFYFIGEDPLLAVPRLIEEILSEQDYIYMFDWSGFDASVQEWELRFAFGLLESILIFPSSVEHQVWQFIIELFIYRKIAAPNGKIYLKTLGIPSGSCFTNIIGSIVNYVRIQYMFFRLTREFVTAFTHGDDSLVGVPTTQYVQMENFKPICDENLWTINIAKSAISREAEGVSFLSRKVREMCHARDELICLRMLKFPEYIVETGAMSTLRAFSIHKDAGIHSRYLYQIYKFLLHRYGKADSLPLNQQNWDPIEYENLRVSYATQNYE

SEQ ID NO: 597 - protein, 616 aa, Beet cryptic virus 1
MDYLTSAFNRITHWFNVPSNLEYIGTFSLPPGILRVNEVAISNHKKTLEHSFNKYLYAHEIKLITQDYRRSDIDEESILADFFSGDVEKFEVPFDEHVETGLRCMADAFRPPRLCRPAHILDVKHGYPYKWNVNAEPPFSTDEYFLNQRKTFGEFIRMHEYEHIDKADFFRRHPNTESHDLIRTIVPPKFGYLKSMIFSWTRRWHHIIKEGFTESTGLHTTGYFYNRFIFPMLLHTKTAIVKQDDPNKMRTIWGASKPWIIAETMLYWEYIAWIKLNPSVTPMLWGYETFTGGWFRLNRDLFCGFLQRSFLTLDWSRFDKRAYFPLLRRILYTARTFLTFDEGYVPTHSAPTHPQWDHTKAIRLERLWLWTLENLFEAPIILPDGRMYRRHFAGIPSGLFITQLLDSWYNYTMLATLLSALGFDPKHCIIKVQGDDSIIRLNVLVPQDQHQNLMDNLVQLAVNYFNAVVNVKKSEFGNSLNGREVLSYRNHNGFPHRDEIMMLAQFYHTKARDPTPEITMAQAIGFAYASCANNKRVLWALKDVYDYYKDLGYTPNRAGLTLTFGDSPDLFVPEISLEHFPTETEIRRYLTSTSYLNEAQNARTWPRTLFINAPAQ

SEQ ID NO: 598 - protein, 481 aa, unidentified
MRRLRNPLAGYVYTGFISDLEETNQRHTNVIRRETAVTYRDEFALQSILDLDYRQYEQHLQGWSRSYYTPEKHQEAILQYSYPDIPVQAIKMDVYNDCIAQVQNEFRSLPNVRAYSVLTQLDLVKYKSSSAAGYGYQGTKGNPGELNHARAISRAKAVLWSAIAADGEGIEHVIKTSTPDIGYTRTQLTDLTEKTKVRQVWGRAFHYILLEGLVADPFIQAVMENNTFIHAGRDPTLSVPQLLSHIAETSDWIYSLDWKQFDATVSRFEIESAFTIIKSKTIFPDRETEDAFEITKQLFIHKKVAAPDGKIYFAHKGIPSGSYYTSLVGSIVNRLRIEYLYRLILGRGPKICHTLGDDSLVGDDELIVPSSFGLIANRIGWYFNIEKTEYSRIPEMVSFLGRSYKGGLNVRDLKRCLRLLVFPEYPVPSGRISAYRAKSIAEDCGGISDLLNRVAARLKRQYGLASEEEVPIYFKRYLPFM

SEQ ID NO: 599 - protein, 472 aa, Fig cryptic virus
MEAGLIEIGNIPERHLRDEFIILVDQPAYDSVRRNAPQADMQEIDGWARSFYTVEGIMASIMQFSKPLIHEPTDPIWNDVKRETLMKIGSLFPQVQSLPFEGGFDHVPFESSSSAGYGYDGKKGEGNNFHRAKSIANAAVRKFSEDIDNQGYDYAVSHLIQQGTPDIAFTRTQLAKLPSIKVRIVFGEAFHNILIEGLSAAPLLEAFKRMDTFYFTGKDPTIYVPRILHKMSTNEGWFICLDWKAFDASVQLWEIDHAFNCIQQLLAFPTELSRLAFLFTRESFKQRKLADPNGILWMRKGGIPSGSYYTNIIGSVINYNRIEYVCKRLGLQKTSCYVQGDDSLIHITGDAKPDLTQLQMLGEQFGWTLNIPKCSLTQDSQLVTFLGRSQMHQLNIRERLKVLRLMCFPEYKVEDPKISTTRVKAIARDAGWSDPVYNKIYLQLKRLYGEVERLPPHLATFVDRFDFQDVNM

SEQ ID NO: 600 - protein, 477 aa, unidentified
MALRSITGYEFHDFQSSLELLNQTHIHIVRRESGVTYHDEFALCELLVDNTRLYEQELEGWSRSYYTGEQHMKAILQYSLPNTPIQDIDVGCYQQAMTNVQERLSSLPIVRAFDVLTQLDQVSFESSSAAGYDYTGAKGPKNEGNHERAIRRAKAVLWSAIAQDGEGIEHVLRSSVPDVGYTRTQLTDLSEKTKVRGVWGRAFHYILPEGTSADPLLQAFKEGGTFYHIGQDPTVSVPYILSDTAGKCAWLYALDWSSFDATVSRFEIHAAFDLLKQRIEFPNFETEQCYEICRQLFIHKKIAAPDGKVYWAHKGIPSGSYYTSIIGSIINRLRIEYIWIKLRGHGPTICYTQGDDSLCGDDERIEPERIADIANPIGWLINPAKTATTRYPEYITFLGRTCYGGLNHRDLIRCLRLLIYPEYPVPSGAISAYRANSIAEDCGGTSSILNDIARRLTRKYGRVSHEEVPKELRVYRH

SEQ ID NO: 601 - protein, 616 aa, unidentified
MDYLTTAFNRITNWFTKPANFEFVGLYSLPPGLLRVNDTAISNHKKTLEHSFSKYLYEDEIHLITKEFRRSDIDLDSILDDFFSGDVEPFEIPFDEHVETGLRCMADAFRPPRLCRPVHILDVKHHYPYKWNVNAEPPFSTDEYFLSQRKTFGEFISMHEYEHIDKADFFRRHPNRESHDLLKTTVPPKFGYLKSVIFSWTRRWHHVIKDGFKDDTGLKTTGYFYNRFIFPMLLHTKTAIVKHNDPNKMRTIWGASKPWIIAETMLYWEYIAWIKLHPSVTPMLWGYETFTGGWFRLNNQLFCGMIKHSFLTLDWSRFDKRAYFPLLRRILYQVRTFLTFDEGYVPTHAAPYHPQWDHEKALRLERLWLWTLENLFEAPIILPDGRMYRRHFAGIPSGLFITQLLDSWYNYTMLATILSSLGFNPKQCIIKVQGDDSIIRLTVLIPHENHLKFMERLTELATYYFNAIVNVKKSEVANTLNGREVLSYRNHNGFPHRDEINMLAQFYHTKARDPTPEITMAQAIGFAYASCGNHKRVLWVLNDIYNYYKDKGYTPNRAGLSLTFGDSPDLFVPEIPLDHFPTTKEIRRYLTCSSYVNEAQNARTWPRTLFLKDPAE

SEQ ID NO: 602 - protein, 478 aa, unidentified
MRPSITGYDYTNFTQDLLKSDRKHPHVVRRETATTYRDDFAFKEVISLDRLAYIQRLEGWSRSYYLPEKHLEALLQYATPNVPCTALNLNVYRQAIQVVENGLRSLQPVRAFDVLTELNQISYKQSSAAGYDYIGAKGPIDGENHKRAISRAKAVLWSVVKEDGEGIDHAIETSVPDVGYTRTQLADLTEKTKVRQVWGRAFHYILLEGLVAQPFIQSIMEGPSFIHTGRDPTLSVPQSLAKVSSQCKYIYSLDWKSFDATVNRFEINTSFDIIKSKVIFPNYETEQAFEITRQLFLHKKVAAPDGYIYEAHKGIPSGSYYTSMVGSIVNRLRIEYIWRIATGHGPIHCETLGDDSLCGDDIFVPATQLADIANRIGWYFNADKTEYSTIPEGVTFLGRTSTGNLNSRDLTKCLRLLVYPEYPVTSGRISAYRARSIADDSGGLSDLLNQVAIRLERSYGIASEEEIPAYFKRYVPFM

SEQ ID NO: 603 - protein, 616 aa, unidentified
MDYLTSAFNRITHWFTKPTNLEYIGDYSTPPSIIRVNEVAIANHKKTLRYAFEQYLYDHEYRMIVDEYRRSDIDQESILADFFSGDIEPFDIPFDEHVEHGLRCMANAFRPPRPCRPAHILDVKHGYPYKWNVNAEPPFSTDPYFLSQRKTFGEFIQMHEYEHIDKADFFRRHPNTESHDFLTTVVPPKFGYLKSMVFSWTRRWHHVIKTGFQDLTGLENSGYLYNRFIFPMLLHTKTAIVKKNDPNKMRTIWGAPKPWIIAETMLYWEYIAWIKLNSGKTPMLWGFETFTGGWFRLNNILFCGLIKQSFLTLDWSRFDKRAYFSLLRRILYTARTFLTFDEGYVPTHAAPTHPKWNHQKALNLERLWLWTLENLFEAPIILPDGRMYRRHFAGIPSGLFITQLLDSWYNYTMLATLLSALGFDPKYCIIKVQGDDSIIKLTTLIPRDQHENFMVQLTALATTYFNATINVKKSEIRNTLNGCEVLSYKNHNGFPHRDEITMLAQFYHTKARDPTPEITMAQAIGFAYASCGNNKRVLWILRDIYNFYKMRDVTPNRAGLTLTFGDSPDVFMPEIPLDHFPTITEIRRYLTCSEYRNEAQDARTWPRSLFISGPAE

SEQ ID NO: 604 - protein, 478 aa, Pepper cryptic virus 2
MAIYRMLNGYVFTAFGNDLEKLDQRHIHHIRREEATTYRDEFALKELMDLSPILYEQFLEGWSRSYYEGSKHLQAIIQYGIPDPDPGLIDNDIYNKAGYVVLESLGSLPRVRAFDVLTELDSVHYEQSSSAGYDYHGPKGPIQGENHIRAITRAKATLWSAIKDEGEGIEHVIRSAVPDVGYTRTQLTDLYEKTKIRGVWGRAFHYILLEGTIANPLLDVFKRGGTFYHIGENPQYSVPDILSQVSECCKYLVAIDWSNFDATVARFEINMAFDLIKTLIMFPNIETELCFEICRQLFIHKKIAAPDGNIYWSRKGIPSGSYFTSIIGSIVNRLRVEYIFRKAYDVGPKMCYTQGDDSLIGVDFRVDPDRLSEIAAPLNWKLNPAKTDVSLYPEHVTFLGRTMYGGINQRDLKRCLRLLIFPEFPVPSGEISAYRAVSIAQDAGGTSEILNSIAKRLRRQYGVAEEHAVPKHFKLYIP

SEQ ID NO: 605 - protein, 475 aa, unidentified
MHNINNYEFTDFTEEVEETGRTHHHVVRREPEVTYEDRFASQVLRHKYPVLYENIISGWSRSYYSGAEHMKSIMQYATPNIKLERLHDGVYHKAIANVRESLRSLPTVRAFNVLNELDLVPFESSSSAGYDYTGVKGPMYGENHERAIRRAKATLWSAIALDGEGIDHVIRTYVPDVGYTRTQLTDLREKMKVRGVWGRAFHYILLEGVVAAPLLEAFSSADTFFHIGKDPTVSVPYLLSTIKSTAEWITAIDWQSFDATVSRFEINAAFDIIEDIVSFPNFETEQAFEISRQLFIHKMLAAPDGKIYWIHKGIPSGSYFTSTIGSLVNRLRIEYMWILKFDRGPKICYTQGDDSLIGDDELFSPMDMTFLVKPYNWLINVTKSMASKIPEAVTFLGRTSIGGLNQRDLKRCLRLLILPEYPVTSGDISAYRAKAIWYDSGLTSEVLGEIARALRRKYGLAEKSKVPKYLIPWKG

SEQ ID NO: 606 - protein, 479 aa, Pepper cryptic virus 1
MVRGTLVGYDYTQFQGDLVKSTHRHPHVVHREIATTYVDQYAYEHIETFSSLYPELILKGWSRSYYLPEKHLAAVLNYSMPNVPASQLSQSLYRQAIESAKNGFISLPRVKAFDVLTEMDQVPFKSSSSAGYNYTGRKGLIGDENHSRAISIAKAVLWSAIKDDGEGIEHVIRTSVPDVGYTRTQLTDLLEKTKVRQVWGRAFHYILLEGLVAYPFIQTVMSHKTFIHAGQDPLISVPRLLSDVALNCKWIYSLDWSQFDATVSRFEIHAAFDIIKSYVDFPNYETEQAFEITRQLFIHKKVAVPDGYIYESHKGIPSGSYYTSLVGSIINYLRINYLWRLLTGHPPQQCHTLGDDSLVGDNSYVNPQAIEEAANKLGWHFNPDKTQYSTVPEEITFLGRTYVGGLNKRDLTKCIRLLVYPEYPVESGRISAYRAKSIAQDAGGLSEVLNRIADKLRRIYGTASEEEVPIYFKRYVFGV

SEQ ID NO: 607 - protein, 616 aa, Carrot cryptic virus
MDYLTTAFNRITHWFTTPTDFEYIGNFSLPPGLLRVNDTAISNHKKTLEHSFSKYLCADEIHLITKEYRRSDIDLDSILDDFFSGDVEKFEIPFDEHVETGLRCMADAFRPPRLCRPAHILDVKHHYPYKWNVNAEPPFSTDEYFLTQRKTFGEFIRMHEYEHIDKADFFRRHPNHESHDLLQTIVPPKFGYLKSTIFSWTRRWHHVIKDGFKDSSGLQTNGYLYNRFIFPMLLHTKTAIVKHNDPNKMRTIWGASKPWIIAETMLYWEYIAWIKLNPGTTPMLWGYETFTGGWFRLNHQLYCGMIKHSFLTLDWSRFDKRAYFPLLRRILYPVRSFLTFDEGYVPTHAAPYHPQWNHEKALRLERLWLWTLENLFEAPIILPDGRMYRRHFAGIPSGLFITQLLDSWYNYTMLATILSALGFDPKQCIIKVQGDDSIIRLTVLIPQETHERFMAHLTHLATYYFNAIVNVKKSEVANTLNGREVLSYRNHNGFPHRDEINMLAQFYHTKARDTTPEITMAQAIGFAYASCGNHNRVLWVLNDIYNYYKDQGYSPNRAGLTLTFGDSPDLFVPEIPLDHFPTKKEIRRYLTASSYINEAQNARTWPRDLFINRPAE

SEQ ID NO: 608 - protein, 475 aa, Beet cryptic virus 2
MRTINNYEYTSFTEDLEETDYTHPHVVRRDPEVTYEDTFAKKELLSRYPALYENLIRGWSRSYYTGQEHLRAIMQYATPNTNFSECVQHAYTKAITKVTESLHSLPTVRAFNVLEELDLIPYESSSSAGYTYRGVKGPQHGENHMQAIKTAKAVLWSVIKDDGEGIEHVIDTYVPDVGYTRTQLTDLREKMKVRGVWGRAFHYILLEGTSAAPLLEAFANSNTFFHIGKDPTVSVPYLISYTKGQAPWLTAIDWQAFDATVSRFEINAAFDIIKSKITFPNLETEQAFEISRQLFIHKKLAAPNGKIYRIHKGIPSGSYFTSIIGSVVNRLRIEYLWNLKFNRGPKVCFTQGDDSLIGDDELYSPMDMAAFVKPLNWFINTSKSMTSKVPEAITFLGRSSLGGLNQRDLKRCLRLLILPEYPVTSGDISAFRANSIWRDSGSTSQILHEIANALRRKYGIAKEQDVPRYLRPWKA

SEQ ID NO: 609 - protein, 477 aa, unidentified
MLRDIRNFQLTEFNSEFELLNDTHPHVIRREAEQILVDEFALSELNGAWPSLYDQKLKGWARSFYTLEGHMQAIHAYSNPDTPISSLNETIYRATIDSLKNELSSLPTARAFDVLTELDKIHYEQSSAAGYNYIGPKGPLYGENHERAIRSARAVLWSAIRDEDGGPAYVLRNMVPDVGYTRTQLTNLQEKTKVRGVWGRAFHYILLEGSSARPLLERFLEHDTFYHIGEDSQLSVPKLMSKLSSECRWIYAIDWSAFDATVSRFEIEAAFEIMKGLIHFPNFDSEQAFELSRLLFTHKKIAAPDGHTYWIHKGIPSGSYFTSMAGSIINRLRIGYLWRLMFNREPKLCYTQGDDSLIGDDELIQPERLAELAAPLNWNINPNKTEYSRTPEFISFLGRTSRGGFNTRELEKCLRLLIFPEHPVPSGRISAYRARSINEDSGFTSDYIQTVARRLRRRYGIAEESEVPKMFKRYVVR

SEQ ID NO: 610 - protein, 478 aa, Beet cryptic virus 3
MAYRNIREYEFTNFNEELYQIEGTHTNTIGRESEVILNDEFAKAILIDEFPVLYEQVCQGWARSFYTLEGHMQAILAYAQPDTPRETFDQTIWDQAYTAVQNELRSLPKARAFDVNTELDKVPYEQSSSAGYGYRSHKGPPGGETHMRAISRVKPTLMTAIRPDEEGPEYTILESVPDIGYTRTQLADLREKTKVRGVWGRAFHYILIEGTAARPLLENFMLGTTFMHIGSDPQLSVPRILHQMKREGSKWLYALDWSSFDSSVTRFEINCAFNLLKERIEFPNEETELAFELSRILFKHKKLAAPDGNIYMIHKGIPSGSYYTSIVGSVVNRLRIEYIWRVLFSRSPHRCYTQGDDSLIGETFLVEPETVAREAAKYGWIMNPDKTEYSTDPGYVTFLGRTAHGFMNARSLDKCLRLLMFPEYPVTSGRISAYRAESIARDCGGLSEVINLVARRLRRQYGVASEDEVPHYFKRYVA

SEQ ID NO: 611 - DNA, 1851 bp, White clover cryptic virus 1
  source 1..1851: mol_type = other DNA
atggattacctaatcactgcatttaaccgaatcactcactggttcttaactccaactaatctcgaatacatcggatcctactcccttccccctgggcttcttcgcgtaaatgatgttgctgtcgcaaatcataaagctaccttagatcgctcgtttgacaagtatctctatgaacatgagataaatcttatcactaaagagtaccgccgatctcctattgatgaagactctatacttgaggacttcttctcaggtgacctaccttatttcgaaatccctttcgacgaacacgtcgaacgtggactggaatgtatggctgccgcctttcggccgcctagaccctgtcgccctgctcacatcttagatgtgaaacatggatacccttacaaatggaacgtcaatgccgaacctcccttctccactgatgaatatttcctatcacaacgtaagacattcggtgaatttatacgaatgcatgaatatgaacacattgataaagaagatttcttccgtcgtcatcccaacattgagtcccatgactttctacgcacagtcgtcccaccaaaatttggctttttgaagtcaatgatattttcgtggacccgtcgctggcatcacataatcaagtctggattccaagactctactgacctggaacaaaccggctatttctttaaccgctttatctttcccatgctactacataccaaaactgctattgtcaagaaaaacgaccctaacaagatgcgcaccatatggggcgcttccaaaccatggatcatcgctgaaacgatgttctactgggaataccttgcttggatcaaacacaatcctggtgctacaccaatgctctggggttacgaaaccttcacaggtggctggttcagactgaaccatgaactattctgtggacttatccaacgatcctttctaactttggactggtcacgctttgataaaagagcgtactttcctctgctacgtcgaatcttgtacactgtaaagactttccttacttttgaagaaggatacgtccctactcacgcagctcccactcacccacagtggagtcaagagaacatcgatagacttgaacgtctctggctgtggactctcgaaaacctttttgaggctccaatcatcttacctgacggtcggatgtacagaagacactttgctggaataccttccggcttgtttattacccaactcttagactcctggtataattatactatgctcgccaccattctgagcgcgcttcatttcgatcccttacactgtattattaaagtgcaaggtgacgattctatacttcgtttaactactctgattcctgttgaccaacacacaaactttatggatcacatcgtcagactagccgatacatatttcaattcaattgtcaatgtcaagaagtctgaagttcgcaactcccttaatggatgcgaagtactctcctaccgtaaccacaacggcctacctcatcgtgatgagatcactatgctagcccagttctaccacactaaggctagagatcccacacctgagataaccatggcacaagccataggctttgcttacgccagttgcgccaatcacaaccgcgtactctgggtactagaagatgtatataattattatcgtgacttaggctacaggcctaatcgtgctggtttgactctcacctttggagactcaccggaccttaccatgcctgaaatgcctcttgatcattttccaactaaatctgaaattcggcgttaccacaccgaaacccactatcagaacgaagcacagaacgctcggacttggcctagaacattgtttatcaatgctccaggcgagtaa

SEQ ID NO: 612 - DNA, 1851 bp, Vicia cryptic virus
  source 1..1851: mol_type = other DNA
atggattacctcatttccgctttcaaccgaatcactcactggttcatcactccgaccaatttcgagtacatcgggtacttctcccttccccccggccttctccgtgtcaatgacgtcgctatcgcgaatcataaatgcacacttgaacgatctttccacacctatctctttgatcacgaaatcaaaagaataatgatagatcatcgccgctcagacatcacagaagattctattttagaagacttcttcgctggtgacttcccctacttcgaagtacctttcgacgaacacgtcgaatatggtttacagtgtatggcagacgccttccgtccgccccgaccttgccgccctgctcacatcttagatgttaagcacggttacccttacaaatggaacgtcaacgcagaattcccgttctcaactgacgaatatttccttacacaacgtaagacatttggcgagttcatccgaatgcacgaatatgaacatatcgataaagacgacttcttccgtcgccatcccaacttggagtctcacgactttctgcgtaccatcgtccctcccaaatttggttacctcaaatcaaccatcttctcttggacacgccgctggcaccacatcatcaagctcggattcaccgacacaacaggactcgacaacaatggttacctctataaccgctttatctttcccatgctcctacacaccaaaactgctattgtcaagaaagacgaccccaacaagatgcgaaccatctggggcgcttccaaaccctggatcatcgctgacacgatgttctactgggaataccaagcctgggtcaaacacaaccccggctcaacacccatgctctggggcttcgaaaccttcactggaggctggttcagattgaaccaactactcttctgtgggctaattcgtcgctcattcataacattggactggtcacgtttcgataaacgagcgtactttcctttgctacgcaagatcatgtataccgtaaaatcctttctcacctttgaagaaggttacgtaccgacacacgcagctcccaaccacccacaatggaatcaagacaaaactgacaaactcgaaagactctggctctggacactcgaaaatttattcgaagctccaatcatcctgcctgacggccgaatgtacagacgtcactttgctggaataccttccggcttattcatcactcagcttttggactcatggtataactataccatgctagcaaccattctacacgctttaggcttcaacccaagtaactgcattatcaaagtgcaaggcgatgattcaatcatccgcctcaacgttctcgtaccctccgaacgccatgaccatctcatgtcccgcatcgtcgagctcgctgaatactactttaactcaattgttaatgtcaagaagtccgagatccgtaatagactaaatggctgtgaagtactttcctaccgtaatcacaacggcctaccattccgcgatgagatcgcaatgctagctcagttctaccacactaaagctagagatcccactcccgaaattacaatggctcaagccataggcttcgcttacgcaagttgcgctacacatacacgcgtactttgggtcctcgaagatatatataactattatcgcgatcaaggatacacgcccaaccgtgctggcctcaccctcacattcggtgattctccagatctcactatgcctgagatgccccttgaccactttccaactaagtccgaaatagtgcgctacctaacatgcactaattatcggaatgaagcacaaaacgcccgcacttggccgagaacattgttcatcaatgctcccgccgagtaa

SEQ ID NO: 613 - DNA, 1440 bp, unidentified
  source 1..1440: mol_type = other DNA
atggagcatcgctttcgtggaatccctcgtggtcttatagaactcgaagaaatcccgacgcgacgcttacgcgaggagcgcgttgtacatatagacgcctggagctcaaaagctatagacgccatcgtaccgctctcacttcgcatcgaactagatggctgggcccgaagttattatacacttcaagcgcacattgattcaatcatgcaatatgatcgtccaaagctgccgcaacccaccaatgctgcgtggaacaccaccacacaacacgtccgaacacagttcgcacggatggataaagtacagactctgtcttacttacaacttgaccaagttaaatgggtcagatcctccgccgctggttatggttacgttggtcgcaaaagcgataatgataactattttagagctcgaaagactgctttcactatagcagaaaagctcaaccacgatcgcgactacggtccgctagctctcgaagactctacacctgacatagcgttcacacgaacacaactatgccaaatcaaggtgaagagaaagattaggaatgtttggggagaggcgtttcattacgtcctacttgaaggtctgttcgcagatcccattattcagcactttatacggaacaagtcgttctactttattggagaagacccgctgcttgctgtcccccgcctagtcgagaagatattatcagaacaagactacgtctacatgtttgactggtctggtttcgatgcctcagtacaagaatgggaaattcgttttgccttttcgttacttgagagtatcctgatctttccctcaagtgtcgaatcttacatttggcatttcattattgagctgttcatctaccgcaagatagccgcacccaatggcaaggtataccttaaaactttaggaataccatctggtagctgtttcacgaacattattggaagtatcgttaactacgttcgcatccagtatctgttcttccgactcaccaacaacttcgtaactgttttcacacacggtgacgatagcctggtcggagtatcaactactcaatacgttcagatggacaattttgaacccatctgtgctgaacacaattggacgattaacatcgccaaatctgctgtctcgcatgaagctgaaggggtatccttcttaagccgaaaagtccgtgagcactgccatgcccgtgacgaattactctgccttcgaatgctcaaatttccagaatacgtcgtagaatctggcgcaatgtcaactttgcgtgcacattccattcaccaagacgctggaatcaattcccgttacttgtattcaatatacaaataccttttacacaggtacggaaaagctgactccctgcctctgaaccaacagaactgggaccctctagagtacgagaacctacgtgtttcttttgctactcaaaactatgaataa

SEQ ID NO: 614 - DNA, 1434 bp, unidentified
  source 1..1434: mol_type = other DNA
atggaccacgagttcaggaagattcgtgaaggtctcatagagatcggcacagtttcccttcgtgtccaaagagacgagtttaaggtcatcattgatgaatatgccgcagaagctgttttcaagtttgttccttcaactatgctctcacaactccagggttgggccagaagtgtttactcactagatcaacatgttgatgccatacttgcgtatcgtcgtcaaaagttgcctgagccgacagatgatgtttggaaccaaaccaaacaacacaccttgcaattgttccgaagattccccaagatcacaccgatctcgtacaagtcgtttgacgaagtaaagtggatatcttcatcctccgccggttatggttacgtcggtcacaaaggtgacggtgacaattacctcaaagcgagaaggaccgcagtgacgatcgctgaaaagctcgatcacgacaggaactacgcacctgaagctattaaccagtctacacctgacgttgcttttacaagaacgcaactctctcaagtcaaagtgaagaccaaggttagaaatgtatggggtgaagcgtttcattacgttttgctggaaggcctttttgccgacccattgatcaacttcttctccaacgaagaatctttctactttataggaagaaatccgttgctcagtgtacctacattaatcgaggaaatcttcaaatccaaggactacgtatatgcgttcgattggtccgggtttgatgcctccgttcaagaatgggaaatccgtttcgcctttcaatgtctggagtcacagctgatatttccttcaaatgtcgaagcccagatctggcgtttcatcgttgagctgttcatctaccggaagattgccgccccaaacggcaccctatttctgaagaccttaggtatcccctctggtagctgttttaccaacatgattggtagcgtcgtcaactacgtccgcatccaatacatgttcaagaagttaactgatgactttgtcgaagcctacactcatggagatgatagtctagctgccgtcagtaccgctcaatacataccgctcgagaagttcggacccatatgcgaaccgtttatgtggagtatcaatactctaaagtctgaagtctcacgtgaaggtagacttactacctttctcagtcgatcgatccgcgataagcaaaactaccgtgacgaattcgtttgcctgcgtatgctcgtgtatcccgaatacgaagtggaagatggaagcatctcagccctccgtgccaaaagcatctatgtcgatgccggaatacattcccaatacttgtaccatgttttcttgtatttgaaacaaaaatatggattagccaataccctccctcacaacctgaggacctgggaccccacagaacatgaagctcttagagcttcttattctaatatcatgtaa

SEQ ID NO: 615 - DNA, 1440 bp, unidentified
  source 1..1440: mol_type = other DNA
atggagcatcgcttccgtggtattcctagaggtctcattgagctcgaagaaatcccgacgcgacgcttacgcgaggagtgcgtaatacatatagacgcctggagctcacaagcaatagacgccatagtaccgctctcactacgcaacgaactagatggctgggccagaagctactacacgcttcaagcacacgttgattcgctcatgcaatatgatcgaccaaagttgcaaccacccaccaataccgcgtggaatatcaccacacagtatattcggactgaatttgctaggatgaagaaagtgactgcattgtcttatcttcaacttgaccaagttaaatgggtcagatcctcagctgccggctacggttacacaggtcgtaaaagcgacggtgataactacattcgagctcgcaaaactgcttttactttagcagagaagctcaatcataaccgagactacggtccactagctctagaagactctacacccgatgtagctttcaccagaacacagctatgtcagattaaggtgaagagaaaaattaggaatgtttggggtgaagcgtttcattacgtcctactagaaggtctgttcgcagatccacttatccagcaattcatgcgcattaaatcattctactttattggagaagatccgctacttgctgtcccccgcctaatcgaggagattctatccgagcaagactacatctacatgtttgattggtctggctttgatgcctcagtacaagaatgggaactacgttttgccttcggcctactcgagagtatcttaatcttcccgtcgagtgtcgaacatcaagtttggcaattcattattgagctgttcatctaccgaaagattgccgccccaaatggcaagatatacctaaagactttaggcataccatccggtagttgttttaccaacatcattggaagcatcgtcaactacgtccgcattcagtatatgtttttccgactcacaagagagttcgtaaccgcgttcacacacggagacgacagcctcgtcggagtacccactactcaatacgttcagatggaaaacttcaaacccatctgcgatgagaacctttggacgattaacatcgccaagtcagcaatctcacgcgaagctgaaggtgtatccttcttaagcaggaaagtccgcgaaatgtgccatgcacgtgacgaacttatctgtcttcgaatgctcaaatttccagaatacatcgtcgagacaggcgcaatgtcaaccttgcgagccttctcaattcataaagacgctggaatccattcccgttacttgtatcaaatctacaaattcctacttcataggtacggaaaggctgactcccttccgcttaaccagcagaactgggaccccatcgagtacgagaacctacgtgtttcttacgctactcagaattatgaataa

SEQ ID NO: 616 - DNA, 1851 bp, Beet cryptic virus 1
  source 1..1851: mol_type = other DNA
atggattaccttacctccgcattcaacagaatcacacactggttcaacgtcccttccaacttggaatacatcggaaccttttcgctcccccctgggattctacgtgtcaacgaagttgctatttctaatcacaagaaaacgttggaacactctttcaacaagtacctttatgcacatgaaatcaaattaatcacccaagactatcgccgctctgacatagatgaagaatctatactagccgatttcttttccggtgacgtcgaaaagttcgaagtaccctttgacgaacacgtcgaaaccggtctacgctgcatggcagacgctttccgtccgcctagactttgccgccctgctcacatcttagatgtcaagcacggatatccttacaagtggaacgtcaacgctgaacccccgttctccactgacgaatacttcctcaaccaacgtaagacatttggcgaattcatacgcatgcacgaatacgaacacatagataaagctgactttttccgccgtcacccaaacactgaatcacacgatttgatcaggacaattgttccaccaaaattcggttacttaaaatcgatgatattttcttggacacgtcgctggcatcacatcataaaagaaggattcactgaatcaactggattacacaccaccggatacttctacaaccgttttatcttccccatgctactacacaccaaaactgctattgttaaacaggacgaccctaacaagatgcgcaccatatggggcgcctctaaaccatggatcatcgccgaaacgatgctctactgggaatacattgcttggattaaactcaaccctagcgtcactccgatgctttggggttacgaaaccttcacaggtggctggttcagactgaaccgagacctattttgcggtttcctccaacgctctttcctcaccttggattggtcacgtttcgacaagcgtgcctacttccccctcttgcgccgcattttatacactgcccgcaccttcctcactttcgacgaaggatacgtccctacacattcagcacctacccatcctcaatgggaccacactaaagcaatcagacttgaacgactatggctatggaccttggaaaaccttttcgaggcacctatcatcctacctgacggtagaatgtacagacgccacttcgccggaataccttccggactgttcatcacccaattgctcgactcatggtacaactataccatgttggccactctcctgagtgcacttggcttcgaccccaaacactgcataattaaagtacaaggcgatgattcaatcattcgacttaacgtactagtaccacaagatcagcaccaaaatttaatggacaacctcgtccaacttgctgtcaactacttcaatgcagtcgttaatgtcaagaagtccgaattcggcaactcactcaatggtcgtgaagtcctatcctaccgcaatcacaatgggttcccccaccgtgacgagatcatgatgttggcccagttttaccacactaaagctagggacccaacacctgagatcaccatggcacaagccataggcttcgcctatgctagttgcgctaacaataaacgtgtcctctgggcacttaaggatgtttatgactactacaaagacttgggatacacccccaaccgagcaggcctaaccctgacattcggtgactcccctgatctttttgttcccgaaatctctcttgaacatttccccaccgagactgagatacgtcgttatttaacgagtacctcctatctcaatgaagcacagaacgctcgcacctggccgagaacgttgttcatcaacgctcccgctcagtaa

SEQ ID NO: 617 - DNA, 1446 bp, unidentified
  source 1..1446: mol_type = other DNA
atgagaagattgcgcaaccctttagctggttacgtttacacaggattcatctcggatcttgaagagacaaatcagcgacacacaaacgttattcgacgggaaaccgccgtaacgtacagggatgagtttgcattgcaatccatcctagatctggactacaggcagtacgagcaacatctacaaggttggtcgcgtagttattacacccctgagaagcatcaggaagcaattttacaatactcctatccagacataccagttcaagccattaaaatggacgtatacaacgattgtatcgcccaggttcagaacgaatttcgtagccttccaaacgtgagggcctatagcgtattaacccaattagatttggttaaatacaagtcatcatcggcggccggttacggataccaaggtactaaaggaaatccaggtgagttaaatcacgccagggctatttcccgagccaaagcggttttatggtcagccatcgcagcagacggtgaaggcatcgaacatgtcatcaagacctcaacgccagacataggctatacacgtacccagcttacagatctcacagagaagacgaaagtcagacaagtatggggtagagcttttcattacatcctgttagaaggattggtcgcagacccattcattcaagcagtaatggagaacaatacattcatccatgctggacgagatccaacactaagcgtgccacagttattatcgcacatcgcggaaacaagtgactggatatattcattagattggaaacaatttgatgcaacagttagcagattcgaaattgagtcagcttttactattatcaagtccaagacgatcttcccagacagagaaacggaagatgcttttgagataaccaaacagttattcattcataagaaagtcgccgctccagacggtaaaatttacttcgcgcacaaaggaattccatcaggaagttattacacttcgctagtcggatctattgttaatagactcaggattgagtatctatacagactaattttaggacgaggtcccaagatatgtcatacattaggagacgattcactagtaggtgatgacgagttgatagtcccatcctcattcggccttatcgccaatcgtatcgggtggtacttcaatattgaaaagacggagtactcgagaataccagagatggtttcatttctaggtcgatcctacaaaggaggtctcaacgtacgagatcttaaacgatgtttaagattactagtctttcctgaataccctgtcccatcaggaagaatttcagcatacagagctaaatcgatagcagaagattgcggaggcatcagcgatctactaaatcgagtagcagcaagattaaagcgtcagtacggactcgcttctgaagaagaagttccaatctattttaagcgttatttaccttttatgtaa

SEQ ID NO: 618 - DNA, 1419 bp, Fig cryptic virus
  source 1..1419: mol_type = other DNA
atggaagcaggtcttatagagattggaaacattccagaacgacacttacgtgacgaattcataatactggtcgaccaaccagcatatgactcagtgagacgaaatgctccacaagctgacatgcaagaaattgatggatgggctagatccttttacacagtagaaggcattatggcatctattatgcaattcagcaaaccactcattcatgaaccaaccgatccaatatggaacgacgttaagagagaaacactaatgaagataggtagtttgttcccacaagttcaatcattaccatttgaaggaggttttgaccacgtcccatttgaatcgagctcatcagccggctacggctatgacggtaagaagggtgaaggtaacaactttcatcgtgcgaaaagcattgcaaatgctgcagtacgcaagtttagcgaggatattgacaaccaaggttacgactacgcagtcagccatctcatacaacaaggtacgccagatattgctttcacgcgaacacagctagcgaagctaccatcgattaaagttcggattgtctttggagaggcatttcacaacattttaattgagggactatcagctgcgccactcttagaggcctttaagagaatggacaccttttactttacagggaaggacccaacaatttacgttccaagaatcttacacaagatgagcacaaacgaaggatggtttatctgccttgactggaaagcgtttgacgcttcagttcaattatgggagattgatcacgcattcaattgcattcagcaattgcttgcttttccgacggaattatcacgactagcgttcctatttactagggagtcattcaaacaacgcaagctcgcagacccaaatgggatactgtggatgcgcaagggtggcattccttcagggagctattacactaacatcattggaagtgtaattaattacaatagaattgagtacgtgtgtaaaaggttaggtttacaaaagacaagctgttacgtgcagggagatgattctcttatccacattactggtgatgcaaaaccagatttaacacagcttcagatgcttggagagcagttcggatggacgctcaatattccaaagtgcagtcttacgcaagacagccaactggttactttcttaggaaggagtcagatgcatcaattaaacattagagagagacttaaagtactccgactgatgtgttttcccgagtacaaggttgaagaccctaaaatctcaaccactagggtaaaagcaatcgctcgagatgctggatggagtgatcctgtttataacaagatttacttacagctgaagcgcttgtatggtgaggtcgaaagacttccaccgcatttagcaacatttgttgaccgttttgattttcaagatgtaaacatgtga

SEQ ID NO: 619 - DNA, 1434 bp, unidentified
  source 1..1434: mol_type = other DNA
atggcgttgagatcaattacagggtatgagttccatgattttcaatctagtttagaattgttaaatcaaactcacatccatatagtcaggcgggagtctggcgttacctaccatgacgagttcgcactttgtgaactattggtagataatacaagattgtatgagcaagagctagaaggctggagtagaagttactacaccggtgaacaacacatgaaagctatattgcagtacagtttaccaaacacaccaattcaagacattgatgtcggttgctatcagcaggcaatgaccaatgttcaagaacggttaagtagccttccaatcgtgagggcattcgacgtattgacccaattggatcaagtaagtttcgagtcgtcttcggcggcaggttacgactatacaggtgcgaaaggacccaagaatgaaggaaatcatgaaagggcaattcgacgagcgaaagcagtgttatggtcagcaatcgcacaagatggcgaagggatcgaacacgtactacggtcatcagtaccggacgttggatacacacgcacgcaactaaccgatttaagtgaaaagacgaaagtaagaggtgtatggggcagagcattccattacatactcccagagggcacatcagcagatccgctgttacaggctttcaaagaaggaggaactttctatcacataggacaagatcctacggttagcgttccatatatactttccgacacagcaggaaaatgcgcatggttatatgcattagactggagttcttttgatgctacagtcagcagatttgaaattcatgcagcgtttgatcttctcaagcagagaatcgagtttcctaacttcgaaacagagcaatgttacgaaatttgcaggcaactatttatacacaagaagatcgctgcaccagacggaaaagtctattgggcacacaaagggataccatccggtagctattatacatccataatcggctcaatcatcaacagattgcggatcgaatacatatggataaagcttagagggcacggaccgaccatttgttacacacaaggtgatgattcattatgtggtgacgatgaacggatcgaaccagagcgaatagctgatatcgccaatccaattggttggttgattaatccggcaaagacggcaacaacaaggtacccggaatacataacattcctaggaaggacatgttacggaggtttaaaccatcgagatcttatcagatgtctaaggttactaatctatccggaatatccagttccgtcaggcgctatctcagcgtatcgcgctaattcaattgctgaagactgcggaggcacgtcttcgatattgaatgatatcgcgcgacgattaacacgaaagtacggtcgtgtatctcatgaagaggtaccgaaagagctccgagtgtacagacactag

SEQ ID NO: 620 - DNA, 1851 bp, unidentified
  source 1..1851: mol_type = other DNA
atggattacctcacaaccgcattcaaccggattaccaactggtttaccaaaccagctaacttcgaattcgtaggactctactccctacccccaggccttctgcgtgtcaatgacactgcaatttctaaccataagaagacactggaacattctttcagcaaatatctttatgaagatgagattcatctcatcaccaaagaattccgccgatctgatattgatctagattcaattcttgacgatttcttctctggcgatgttgaaccattcgaaataccattcgacgaacacgtcgaaaccggtctacgctgcatggcagacgctttccgtccgccaagactttgccgtcctgttcacatccttgatgtgaaacatcactatccttacaaatggaacgtcaatgctgaaccccccttctccactgatgaatacttcctatcacaacgtaagacattcggcgaattcataagcatgcacgaatacgaacacattgataaagccgactttttccgtcgccatcctaatcgcgaatcccacgaccttctcaaaaccaccgtccctcctaaatttggatacctgaaatcagttatcttttcttggacccgccgctggcatcacgtcattaaagatggattcaaagatgacactggcctcaaaacaaccggatacttctataatcggtttatcttccccatgctcctacacactaaaactgcaattgtcaaacacaacgatcccaacaagatgcgcaccatttggggcgcttccaaaccttggatcattgctgagactatgctttattgggaatatatagcttggatcaaactacaccctagcgtcacaccgatgctttggggttacgaaaccttcacaggtggatggttcagactaaacaaccaactcttttgtggtatgatcaaacattcattcctcactctagactggtcacgcttcgacaaacgagcgtactttccactattacgcagaattctctaccaagtacgaactttcctcacatttgatgaaggttacgtgccgacacatgcagctccgtaccacccacaatgggatcacgaaaaagcactgagacttgaacgtctttggctctggacactcgaaaacctcttcgaagcaccgatcatcttacctgacggtcgcatgtaccgacgccacttcgctggaataccttctggcctgttcatcactcaattgctcgattcctggtacaactatactatgctcgctaccattctaagctctctgggcttcaatcccaaacaatgcatcatcaaagtacaaggcgatgactcaatcattcgcttaactgttctcatacctcatgaaaatcatctgaaattcatggaacgtttgactgaactagctacttattatttcaatgccattgtcaatgtcaagaagtctgaagttgcgaacacactaaatggacgcgaagtactctcttaccgcaaccacaacggtttccctcaccgtgacgagatcaacatgcttgctcagttctatcacactaaagcaagagatccgacacccgaaatcactatggctcaagcaataggttttgcctatgctagctgtggaaaccacaaacgcgtactttgggtactgaacgacatatacaactactacaaggacaaaggctacacacctaaccgtgcaggtctgtctctaacatttggagactcaccagatctgtttgtgcctgaaatccctcttgatcatttccctacaactaaggagatacgtcgctacctgacgtgttcttcttatgttaatgaagcacagaacgctcggacttggcctaggaccttatttcttaaggatcctgctgagtaa

SEQ ID NO: 621 - DNA, 1437 bp, unidentified
  source 1..1437: mol_type = other DNA
atgagacccagcattacaggttatgattacacaaatttcacacaggatttgcttaaatctgaccgtaagcacccacacgtcgtacgtcgcgagactgcgactacttacagagacgactttgctttcaaggaagtaatttctctcgataggttagcttacatacagagattggaaggatggtcacgaagttactatctaccagagaagcatttagaggctttactccagtatgctacacctaatgtcccatgcactgctttgaaccttaacgtttatcgtcaagctattcaagtagtagagaatgggcttcgtagccttcaaccagtgagggcctttgatgttctaactgaactcaatcaaatttcatacaagcagtcctcagctgcaggttacgattacatcggtgcgaaaggacctattgatggtgaaaaccacaaaagggctatatcccgtgctaaagctgtattgtggtctgtcgttaaagaagacggcgaaggcatagatcatgctattgagacctcagtaccagacgtcgggtacactcgcacacagttggcagatttgaccgaaaagacaaaggttagacaagtttggggccgtgcatttcattacatccttttagaaggacttgtagcacaaccatttattcaatcaataatggaaggaccctcgtttatccacaccggtcgagatccaacactcagcgttccgcaatcattggctaaagttagctcgcaatgcaaatacatctattcattagattggaagtcgtttgacgcaaccgttaatcggttcgaaatcaacacatcttttgacatcattaaatcaaaggtcatctttcctaactatgaaactgaacaagcatttgagataaccagacagctctttcttcacaagaaggtagccgcacccgatggttatatttacgaagcgcacaaaggaattccatcaggaagttactacacctcaatggtcggatcaatcgtgaatcgactaaggatcgagtacatctggagaatcgcaacaggacatggtccgatacactgcgagactttaggagacgactctctctgcggagatgatatcttcgttccagctacacagttggccgatatcgcaaaccgcataggttggtacttcaatgccgataagacggaatactcaactataccagaaggcgtcacctttctaggacgaacgtcaaccggaaacttaaactcaagagatttaaccaaatgtcttcgactattagtttaccccgagtatcctgttacatcaggccgaatttccgcctatagagctaggtcaatagctgacgactcaggaggtctcagcgatttgcttaaccaagttgctattaggttagagcgtagttatggcattgcttcggaagaagaaattccagcttattttaaacgttatgtaccatttatgtaa

SEQ ID NO: 622 - DNA, 1851 bp, unidentified
  source 1..1851: mol_type = other DNA
atggattacctcacttccgcatttaaccgaatcactcattggttcaccaaacccaccaatttagaatacattggagactactctacacctcctagtatcatccgcgtcaatgaagttgctattgctaaccacaagaaaacacttcgctacgcctttgaacagtatctgtacgatcacgaataccgtatgatcgttgatgaatatcgtcgctcagacatagaccaagagtctatcctcgccgactttttctctggtgatattgaaccctttgatatacctttcgacgaacacgtcgaacatggactacgctgtatggccaacgccttcagacctcctagaccttgccgccctgctcacatcctagatgtcaagcacggatacccttacaaatggaacgtcaacgcagaaccacccttctcaactgacccttacttcctttctcaacgtaagacctttggcgagttcattcaaatgcacgaatatgaacacatcgataaagctgacttctttcgaagacatcccaacaccgaatcacacgacttcctcactacagtggtccctccaaaatttggatacctcaagtcgatggttttctcctggacccgaagatggcaccacgtcattaaaaccggattccaagacttaactggactcgaaaactctggatatctctacaatcgttttatctttcccatgctcctacacaccaaaactgctattgtcaaaaagaacgatcctaacaagatgcgcaccatctggggcgcccctaaaccttggatcatcgctgagacaatgctatattgggaatacatagcctggatcaaactcaactccggtaagacaccgatgctttggggatttgaaaccttcacaggtggatggtttcgtttgaacaacattttgttctgcggactcatcaaacaatccttcttaacattagactggtctcgcttcgacaagcgtgcctatttcagtcttctccgacggatcctttacacagctagaaccttcctcactttcgacgaaggctatgtcccaacacatgcagcaccgacccaccccaagtggaaccaccaaaaagcactcaaccttgagcgcctttggctctggacactcgagaacctctttgaggcacccatcatcctacctgatggccgaatgtacagacggcacttcgccggaattccttcaggtctatttatcacacaactattagactcttggtacaattacacgatgctagccacactcctaagcgcactgggcttcgaccctaaatattgtattattaaagtgcaaggcgacgactcaattatcaaattgacgaccttaattccacgtgaccaacacgagaacttcatggtccaactcaccgccctcgcaaccacgtactttaatgccaccatcaatgtcaagaagtcggaaatcagaaacacgctcaacggatgtgaagtcttatcatacaagaaccacaacggtttcccccaccgtgacgagatcactatgcttgctcaattctaccacaccaaagcacgtgacccaacgcctgaaattaccatggctcaagcaataggctttgcctatgccagctgcggcaacaacaaacgcgtactgtggattcttagagacatttacaacttttacaagatgcgtgacgtcacccctaatcgtgcaggtttaaccctcactttcggagactcaccagacgttttcatgcctgaaatccctcttgatcattttcctacaataactgaaattcggagatacctaacatgctctgaatatcgcaacgaagcacaagacgctagaacttggccgagatcactattcattagtggtcctgccgaataa

SEQ ID NO: 623 - DNA, 1437 bp, Pepper cryptic virus 2
  source 1..1437: mol_type = other DNA
atggcaatttatcgcatgttgaatggatatgttttcaccgcatttggtaatgatcttgagaaattggatcaaagacatatacatcacatcagacgagaagaagcgacaacatatcgcgacgagttcgctctaaaggaactcatggatttaagccctattttgtatgaacaattcttagaaggatggtcacggagttattacgaaggatcaaaacacttacaagcaattatacaatatggcatcccagacccagatccaggcttaatagataatgatatctataacaaggcaggatatgtggtattagaaagtttaggtagccttccacgtgtgagggcatttgacgtactcactgagttagactcagtacactatgagcaatcttcatccgctggctatgactaccatggaccaaaaggacccatacaaggcgaaaatcacataagggcaattaccagagccaaagcaacattgtggtcagcaattaaagatgaaggcgaaggaatagaacatgtcatcaggagcgcagttccagatgtcggttacacccgcacacaattaacggatctatacgagaagaccaaaatcagaggagtttggggtagagcgtttcattacatcctacttgaaggaacaatagctaatccattgctagatgttttcaagagaggcggaacattttatcatatcggagagaatccacaatatagcgtaccagatatcttatcacaagtatcagaatgctgtaaatatctagtagcaattgactggagcaatttcgatgctacagtagctagatttgaaatcaatatggcatttgatttaataaagacgctaattatgtttccaaacatcgagacggagttatgtttcgagatatgcagacaactcttcattcataagaagatagctgcaccggacggaaatatatactggtcgcgcaaaggaatcccatcaggcagttactttacatccatcataggatctattgtaaacagattaagagtagagtatatctttagaaaggcatacgatgtcggaccaaagatgtgttatacacagggagatgattcactaatcggagtagactttcgagtagacccagacagattaagtgagatagcagcaccattgaattggaagcttaatcctgctaaaacagacgtttcgttgtacccggagcatgtcactttcttaggaaggactatgtacggaggaataaatcaaagagatcttaaaagatgtctgaggttattaatattccctgaatttccggttccatcgggagagatttcagcatacagagcagtatcaatcgcgcaagatgccggaggcacaagtgagatactgaacagtatagcaaagagacttcgaagacagtatggagtcgcagaggagcacgcagttccaaagcatttcaaactttacattccataa

SEQ ID NO: 624 - DNA, 1428 bp, unidentified
  source 1..1428: mol_type = other DNA
atgcacaacatcaacaattatgagttcacagactttactgaagaagtagaagaaactggcagaacccatcatcacgtagttaggcgagagcctgaggttacatatgaagatagatttgcttcgcaagtcttaaggcataagtatccagtcttgtatgaaaacatcatttcaggatggtctagaagttactactctggagcagaacacatgaaatcaatcatgcaatacgctacaccaaatattaaactagaacgtttacacgacggcgtataccataaagccatcgccaacgttcgagaaagtttacgtagccttccaactgtgagggcattcaatgtattgaatgagttagacctcgttccattcgaatcgtcatcatcggcgggttacgactacacaggcgtgaaaggtccgatgtacggtgagaaccatgaacgggcaattcgacgagcgaaagcgacactttggtcagccatagcattagacggcgaaggcatagaccatgtcatcaggacatacgtcccagacgtcggttacacacgcactcagctaacagatcttcgagagaagatgaaagtcagaggagtctggggaagagcattccattatatacttctagaaggagtagtggcagcccctttacttgaagccttttcaagtgcagacacattctttcacattggcaaagacccaacagttagcgttccttatttgctttcaacaattaagtcaacagcagaatggataacagcaatagactggcaatcatttgatgcaacagtaagccgttttgaaattaacgcagctttcgacatcattgaagacatagtcagttttccaaactttgaaacagagcaagcattcgagatttcaaggcaactattcatacacaaaatgctggcggcacctgacggcaaaatatactggatacataaaggtatcccatccggaagttatttcacatcaacgatcggatcattagtcaacagactacgcattgaatacatgtggattctcaaattcgatagaggtccaaagatatgttacactcaaggcgatgattcactgatcggtgacgatgaactcttcagtccaatggacatgacatttctggtcaagccatacaactggttaatcaacgtaaccaagtccatggcatccaagattccagaagcagttacgttccttggaaggacaagcataggcggcctaaatcagagagatctgaagcgctgcttacgactactgatattaccagagtaccctgttacatctggagacatatcagcatacagagctaaggcgatctggtacgactcggggttaacgagtgaagtgctaggcgaaatagctcgcgctcttcggcgtaagtatggactagcagagaaatccaaagttccaaagtatttaataccttggaaaggatga

SEQ ID NO: 625 - DNA, 1440 bp, Pepper cryptic virus 1
  source 1..1440: mol_type = other DNA
atggtaagaggcacacttgttggttatgactatacccaatttcagggtgatttagttaaatcaactcaccgacaccctcatgttgttcaccgcgaaatcgcaacaacatatgtcgatcagtatgcttatgagcatattgaaacattcagtagtttatatcctgaacttatccttaaaggatggtctaggagttactatctgcccgagaagcatctcgctgcagtgttaaactacagtatgccaaatgttcctgcatctcagctcagtcagtcattatacagacaagcgattgaatcagctaagaatggatttattagccttccccgagtgaaggctttcgatgtacttaccgaaatggaccaagtaccttttaagtcgtcttcatcggcgggttataattacacaggcaggaaaggccttattggtgatgaaaatcactcaagggcaatttcgatagctaaagctgtattatggtcagccatcaaagatgatggagaaggcattgaacatgtcattcggacttcagtaccagacgttggctacactcgaactcagttaacggacttgctagaaaagacgaaagtcagacaagtttggggcagagcattccactatatcctacttgaaggattggttgcatacccgtttatacaaacagtcatgtcacataaaacgtttattcacgcaggacaagacccgttaattagtgttcctagattattatcagacgttgcattgaattgcaaatggatttactcacttgattggagtcaattcgacgctacagttagtcgattcgaaatccacgccgcttttgacataattaagtcttacgtagactttccaaattatgaaacagagcaggctttcgagatcactcgacaactattcatacataagaaagttgcagtacctgacggttacatctacgaatcacacaaaggaattccatctggaagttactacacttcacttgttggatcgattatcaattatttgagaatcaactacctctggagactcctcaccggacacccaccacaacagtgtcacactttaggagatgactcattggttggagataactcatatgttaatccacaagcgattgaagaagcagcaaacaagctaggctggcacttcaacccagataagactcaatactctacagtacctgaagagatcacatttctcggacgaacttacgtaggcggattaaataagagagatctaacgaaatgtattagattactcgtatatcccgaatacccagtagagtcaggtcgaatttcagcttatagagctaagtctatcgcacaagatgctggcggtctcagcgaagtgctaaataggatagcagataagcttagacgtatttacggtacggcttcagaagaagaggtaccaatttattttaaacgctatgtatttggagtttaa

SEQ ID NO: 626 - DNA, 1851 bp, Carrot cryptic virus
  source 1..1851: mol_type = other DNA
atggattacctcacaaccgcattcaaccgaatcacacactggttcacaacacctaccgatttcgaatatattgggaacttctccctacctccaggcttgctccgtgtcaatgacactgcaatttctaatcataagaaaactctggaacattctttcagcaaatacctctgtgctgatgagattcatctcatcactaaagaataccgtcgatctgatatcgatcttgattcaattcttgacgacttcttctctggcgatgttgaaaaatttgaaattccattcgacgaacacgtcgaaacaggtttacgctgcatggctgacgccttccgtccgccaagactctgccgcccagctcacatccttgatgtgaagcatcactacccttacaagtggaacgtcaatgcagaaccacccttctcaactgacgaatacttcctcacacaacgtaagaccttcggtgagtttatacgcatgcatgaatacgaacacattgataaagccgacttctttcgtcgccaccctaaccatgaatcccatgacctccttcaaactatcgtacctccaaaatttggctatctaaagtcaactattttctcttggacccgtcgatggcaccacgtcattaaagatggatttaaggatagctccggtctacaaacgaatggatacctatacaatcggtttatctttcccatgctcctacacaccaaaactgcaattgtcaaacacaatgatcccaacaagatgcgaaccatatggggcgcttctaaaccttggattattgctgagactatgctctactgggaatatatagcttggatcaaactcaaccctggcaccacacctatgctttggggttacgaaaccttcaccggtggatggttcagactgaaccaccaactatactgcggaatgatcaaacattccttcctcaccctggattggtcacgcttcgacaaacgagcgtactttccactcctacgtagaatactctatcctgtacgatccttcctcacatttgacgaaggttatgtaccgacacatgcagcaccgtaccacccacaatggaatcacgaaaaagctttgcgacttgaacgtctctggctctggacacttgaaaacttattcgaggcacccatcatactacctgatggacgcatgtaccgacgccactttgccggaataccatccggattgttcataactcaactgctagattcctggtacaattacactatgctcgctaccattctaagcgctctaggcttcgaccctaaacaatgcatcattaaagtacaaggcgatgactcaataatccgtctgactgttctaattccacaagaaacccacgaacgtttcatggctcatctgactcaccttgccacgtactacttcaatgctattgtcaatgtcaagaagtccgaagtagccaatacacttaatggtcgtgaagtactctcttatcgcaatcacaacggtttccctcaccgtgatgagatcaacatgcttgctcaattctatcacactaaagcaagagataccacacctgagataaccatggctcaagcaataggtttcgcctatgctagctgtggcaaccacaaccgcgtattatgggtacttaatgacatatacaactactacaaggaccaaggatattcacctaatcgtgctggcctgactctcacctttggagactcacctgacctttttgttcctgaaatcccccttgaccattttcctacaaagaaggagatccgtcgttacctgacggcttcttcctacattaacgaagctcaaaacgctcggacttggcccagagacctgtttattaacaggcctgccgagtaa

SEQ ID NO: 627 - DNA, 1428 bp, Beet cryptic virus 2
  source 1..1428: mol_type = other DNA
atgaggacaatcaacaactacgagtatacaagtttcaccgaagatctcgaggagacagattatactcacccacacgtggtcaggagagatcctgaagttacctatgaagacaccttcgcaaagaaggagttgttaagcaggtatccagcactgtatgaaaatttaatccgtggatggtcaagaagctattacactggacaagagcacttgcgtgcgatcatgcagtatgccacaccaaatactaactttagtgaatgtgtccaacacgcttataccaaagcgatcactaaagtgacagaaagtttacatagccttccaactgtgagggcattcaatgttctggaagagttagatctcattccatatgaatcgtcatcatcggcgggctatacgtatagaggcgttaaaggtccacaacatggtgaaaatcatatgcaagcgatcaaaacagccaaggcagtactttggtccgtcataaaagacgacggagaaggtatcgaacacgtcattgacacttatgtgccagacgtaggctatacgagaactcagcttactgatcttcgagagaagatgaaggttagaggagtatggggaagagcgtttcattacattcttctagaaggaacttcagcggcaccgctacttgaggccttcgcaaactcaaatacattcttccatattggaaaagacccaacagttagcgtaccatatctaatttcgtacaccaaaggacaagctccatggttaacggcaattgactggcaagcatttgatgctacagttagcagattcgaaataaacgcagcctttgatataatcaagagcaagattacgtttccaaacctggaaacagagcaagcgttcgaaatctcaagacaactgttcatccataagaagctggcagcgccaaacggaaagatatacaggatacacaaaggtatcccatcagggagttatttcacatcaattatcggatcagtcgtgaatagattgagaattgaatatttatggaacctcaaattcaacagaggaccaaaagtatgtttcactcaaggcgacgactcgctaataggagatgacgaactgtacagcccaatggacatggcggcatttgttaaaccactgaactggtttataaacacatcaaagtcaatgacttcgaaagtgccagaagccataacgttcttgggacggtcaagtttaggcggcttaaatcaacgtgatttaaagcgttgcctccgtttactaatattaccagagtacccggttacatctggcgatatatcagcattcagggctaactcaatctggagagattctggttcaacaagccaaatccttcatgagatagcaaacgcacttcgacgaaagtatggaattgctaaagagcaggacgtaccaaggtatctcagaccctggaaagcctaa

SEQ ID NO: 628 - DNA, 1434 bp, unidentified
  source 1..1434: mol_type = other DNA
atgttgagagatattagaaactttcaattaaccgaattcaattcagagttcgagttattgaatgacacacatccccatgtcattcggcgagaagctgaacagattttggtggatgagttcgctttaagcgaactaaacggtgcatggccatcgctatatgaccagaaactcaaaggttgggctagaagcttttataccttagagggtcatatgcaagcgatacatgcatattctaatccagatacacctatctcttctttaaacgagaccatctatcgagctacgattgatagtctaaagaatgagttaagtagccttccaactgcgagggcttttgatgtcttgactgagctagacaagatacactacgaacagtcctccgctgccggctacaattatattggacctaaaggaccactatatggtgagaatcatgaacgcgcaatccgaagtgcccgcgccgttctatggtcagcgattagagacgaagacggtggtccagcttatgtcttaaggaacatggttccagacgttggatacactcgcactcaattgactaatcttcaagagaagactaaagtccgtggagtatggggtagagcgtttcattacattctactagaaggttcttccgcaagaccacttctagagaggttcttagaacacgacaccttttaccacattggagaagattcgcaattgagcgtaccaaaacttatgtccaaattaagttctgaatgtcgatggatttacgcgattgactggtcagcatttgatgctacagtgagccgatttgaaatcgaagcagcttttgaaattatgaaaggattaatacactttccgaacttcgacagcgaacaagcattcgagctaagtaggttgttattcactcataagaagatagcagctccggacggacacacgtattggatacataaaggaattccttcagggagctattttacttcaatggcaggttctatcattaatagactgcgtattggatatttatggcgactaatgttcaatagagagcctaaactttgctacacgcaaggagacgactcattgattggtgatgacgaactaatccaaccagaaagactggctgaattagctgcaccattaaattggaacattaacccgaataagacagagtattctcgtactccagagtttatttcttttctaggacgaacatctagaggaggatttaacacaagagagcttgagaagtgcttacggttattaatctttcctgagcaccctgttccatcgggacggatttccgcatacagagcaaggtcgatcaatgaagacagtggctttaccagcgactatattcagaccgtcgctcgacgattaagaagacgctacggaatagctgaagaatcagaggttccgaagatgtttaaacgttacgttgttaggtag

SEQ ID NO: 629 - DNA, 1437 bp, Beet cryptic virus 3
  source 1..1437: mol_type = other DNA
atggcgtacagaaacattcgtgagtatgagttcactaacttcaatgaagaattgtaccagattgaaggaacccacactaatacgatcggacgagagtccgaggtaattctgaatgacgagttcgcgaaagctatcctcattgacgaatttccagtgctatacgagcaagtctgtcaaggatgggctagaagcttctacaccctagaggggcacatgcaagctattctcgcatacgcacaacccgacactccaagggaaacctttgaccaaaccatttgggatcaggcatacactgccgtccagaatgagttacgtagccttccaaaagcgagggcatttgatgttaatactgaacttgacaaagttccatatgagcagtcctcctcagcaggatatggctatcgtagtcacaagggaccacccggaggcgagacccatatgagggctatcagtagagttaaacctactctgatgacggcgataaggccagatgaagaaggaccggaatacactatactcgaatcagtacctgacattggatacactcgcactcaacttgcagatcttcgtgagaagactaaagttagaggcgtatggggcagggcattccattatattctaatagaaggcacagccgcaagacctttacttgagaactttatgcttggaactactttcatgcacataggttcagatccccagttgagcgtaccacgtatactacaccagatgaaacgcgaaggttctaaatggttatatgcactagattggtctagttttgactccagcgtgacgagatttgagattaattgtgcctttaacttattaaaggaacgtatcgagtttcctaacgaagagacggaattagcttttgagcttagcagaatcttatttaagcataagaagttagccgcccctgacggtaacatatacatgatacacaaaggaataccatccggtagttactacacttccatcgtaggttcagtagtcaatagacttcgaatcgaatatatatggagagtactattttcgagatcaccccatcggtgttacacccaaggtgacgattcattaatcggcgagacttttctcgttgaaccagaaacggtcgcccgcgaagcggcgaagtatggatggataatgaaccctgataagacagaatactctacagatccaggatatgtcacattcttaggaagaacggcacatggatttatgaacgctagatcactagacaaatgtctgagacttctaatgtttcctgagtaccctgtaacttcagggcggatttccgcctatagagcagagtcaattgcaagagattgcggaggacttagcgaggtaataaatctcgtagctcgtagattacgtagacaatacggagtagctagtgaggacgaagtcccacattactttaaacgttatgtagcttaa

SEQ ID NO: 630 - DNA, 1464 bp, White clover cryptic virus 1
  source 1..1464: mol_type = other DNA
atgaatcaagacactcctctcgccaatctcaatggccccgaagttccatccggcaacgtccctcccgccaaccctcctggtcgaacaaacgtcgcccctcccgcccaaggtgctgttcaacagcctcctgctccggctgctcgtcgtgcccgcaacccacacggccctgtccctcctgctggaccatcccgttctgctggtgcccctgctatgcttgaactttccgctgcctaccctatgtacaccgaacaacgtcgtgcacccaactactatgtgcctgacgcacaacttctcttccacaccctcggtgtctgcgaccaactgatgaccacaactgaccgcttcctccgctccatgccttcatggttgccaatcgtctctcagctttacgtctctgtcctttggaatgttatgatactcaaggtctatgtcaacaccggttacggtgctgcctacgcacatgacttggatgtcctcctcaaccaccttcaaattaacgaatgtatgatccctggccccctcgtcccctttttccaatccctcgctgccgtcaatggcccttttgactggataggtgatattattcctgccatgccatcattcactgaactctggactgatgaatttgctccccatgctgcttacgctaggcaaatacccatacctgccatcctccttgatcagctttaccgttttgccactcttgcctttgatgctcaactacaaacaaactatgccacttttgaatggtatagcaacattttcaaccaagatgtcaacactcacaatgctcgtctccgcctcggccctcaactctgtggctctctgttcacaacacaagcccagtgtgactccgcccgcgccttctggaacccagcttttgctaatgggtttactagaatcgatgctgctaatggccccctaatggcttttccccaactacttggatttatttctcaagatggtgccctgcaatctaactggttcatgcacatctccttaatcatgcacaagtacgctcagtacttcaatggttctgtaccccttaagtccatctcccctgttggaattggtgcttccgtgatctacggaactccgcttgaagataccaacgtccgtgactggctctaccccgctgctgctgctattgctcctttccgttctacccgctttttaccgcgtcgtgaactacctgcgaccctagctgtccgtttcgcccatgccgatcatgagatcgaagaacaagctgaacagtattccatactgtgtcacaccaatatgaagtggtatgtcaacaacgccactcagaacaaccacacagctattgaaggaaactacattcaccaaggtgagtactggaacttcacccctttccgctactctcctcctgtctctctgaagacccagtttgctcaagtgatcgcttcccgctaccaccaacaagctgccaaccgtgctgaatga

SEQ ID NO: 631 - DNA, 1464 bp, Vicia cryptic virus
  source 1..1464: mol_type = other DNA
atggaagctcatactcccgctgctgatgtcaatggacccaatatcccctccggtgctgtctctcagccagaaatcgctccacacaatcaagctgcccccaacgtctctggtgctgctcaggctataatagcccccacccctgctcgtaagcgcacgcctcacggacccattcctgctgccacctcatctggcaacacctctgctcctgctctcctggaattagctgctgcttatcccatgtacaccgagcaacgccgttcattcaactttttcatcccagactcccaaatgatgtttcactctttaggtatctgcgactcaatgatgaactccaccgatcgttttcttcgatcctcacccgcttggctccccatcgtttcacaactttacatctctgtactgtggaatgttatgattatccgcatcctctctcacactggatatgccccttccttcaccgatctactcaatactctcactactgaccttcaaattgaagagtgtatggtccccggaccactagtccccttcttccaatccttggcctctaccaatggcccttttgactggataggcgatatcactcctgccctccctggatttgattctctctgggatgccacgaatttcactccgcacgcaagctacacccgcttcgtccccattcctgccatcttgttagaccagctttactactgcgcgacttacgtcggcgttaatcaaggcgacctctaccctaccttcacttggtatagaaacattttcacccgcactggtgcaaacactcctgctctcctccgcatgggcccaaatctttgtggctcacttttcaccacctccaatcaattcgatgctgcccgtacttattggcgcgcctgctttggcactggttttacccgtgttaatgtcaccgctgctgccttcaccaactacctacagctgttaggtctccgttcccaaactggagaaccgcagactgcctggttccagaatgtgaccatggttatgcagaaatatgcacaacacttcaatggttccgttcccctcaagagtatcgacctcactggcattggcgccgtcgcccttaccggcacaccagttaataatactgctgtccgcgactggctctatcctccaaatgccaatatcgaaccgttcaccactggtcgattcaaccctcgtcgtgaaatcccggcccaactccgcatccgcttttctcactccgatcatgaactcgaactccaagctgaacagtacgctattgctgcgcacaccaacattaggtgggctgctaacatagctacacaacatgaaaggaccgccatcaatccggctcatcttcaccaaggtgattactggaacatgacccctttccgtcacaccggacatctcggcctcaagactcagtatgcccagctcatcgcttctcgctatcaccaacttgccgccaaccgtgtcgactga

SEQ ID NO: 632 - DNA, 1518 bp, unidentified
  source 1..1518: mol_type = other DNA
atggctcatcgtactcccactaatgccccggctcttcctcaagttgatgggatcaaccccaaccttccccccaacgacccaggaaccgtcgccgccgcccctaatgctaggaacttgcatctcgaaagagaacaagaagctagacaagaccgcgccgccgccgccttcgtccccaacactcgctttgcggtgagaagaccgacgattcgcccctccccggcccactctgcccctgacctagagactgctctctttgattcagccgtcaaccacccccccaccccggtctcctatccgtctacctcatcctacatccccaacttcacttccgccttctactatctcaacaagatggactccttgatggtccaaactctcaactggacaaacaactgctctggatgggttcccccatactcccagatctacatcagcatgcttctctatcttcaagtaatgcgcgccatgaagaaagctggcgtcctcaggcccaactctgaactatcccatctcttcaatgagatgtccacaatctttcctttcgaaagtctgatggttcccggccccctcgtcaacttattcgagaatatcactgcctttcgtcctcttcaaacggactcttttggcaatgtgactcccttccttccagccgaacccggttggtcaaacgcgaccttcttcgctcccaacggctcattagttcgacacctccctcacatacccgctttaatctcccgtctccggagaatttgcgaaaccgcttccgagaatggcttaaatgacatctcgttttccgcccaccaccacggcccggagttcatatcagaactttttggccacatttgtgacaacgatcttcctgaacagctactgctgctcacccctggcctggccacctcctactctggtacactctacctctggcgccaagcccgctctcaactacaaaggtccctcttccctgaggcactcactgtcaacgacgtagtgcccaatacgtggacctccttcctctgcctggacaatgatgattcatggttcagtcccctcgccgctatgatgaacaagtactgccaatattggcatggctcagctcccctctcctccatccccgctgatggatccgctgctggctcaatgatttgcaatgagctcaatggatcctctatttaccggctggctcaatggaccgctcctattatggacccccccgctgacgaggatgccccacctgtcattgccgaacctggctactactaccccaatcccaaccccgtcctcatctttgacgctcgtacctgcattgaagacatctcttctgcacacatgttctccgctatgaccttccatcccaatctcataccatacggagctaacagagctaactttctgaaaggacagttttggaattgccaccccccaagctacagcgctcctgcccaccaggtctatccagctgtatccgcccttatcgctcgtgagtatcacagtgaaactaacctttcatctgacaagtga

SEQ ID NO: 633 - DNA, 1041 bp, unidentified
  source 1..1041: mol_type = other DNA
atggctagcccacgtgactctatgatgacgactgctcaagacgctaagaaacgtaaagtttctcatattttgagtccgattcgaatgatcgagcctgctgctcaatccctcgcaatcatcccagttgtccctcaagtccaaatggatgacgctgaagctatggctgaattgctgtatcgtgaacgcgcccgcattgaacttgatattaatcctgcttatatcagtagattggaatcccgtcgagagattggtttctatcctcctgttgcaagtaagaacgttccgttcactactttcaacatcgatgtcgctgaattcagacgctgcataacacatgtacttactgctgcactcaaagtacgttattacgatcgatcaaatcttcgcaacgctgagatcaatactgagataaacacgattgtgcctcgcactgtgtctgcatgcatgtgtgccgtttacgctaaactgcgctcaatacatcgcacccacggtaccctccggaataggtatgtcactactcctacttacaataaggatattgaactgccccttcctttagctatcgctatacaaggtctaggtgccttccgcactgaaagcattctcgcaaaccgagttatcgctccgacctaccctgaggccacccagtatgaaggacgcgctcaagacgctttcaacatgactgagtaccagaactacatcccaactcttaaagatcttggtatcccctgtaaatcagtggaaatccatgacaagaagggaaccgcttggtggagttacaaaatccacaacgaccacggtacatcagatctcgtctgcctgcttcctcctacaaactactctccgcttgctgttgcaacccgaatgctcttcctcgctactcaggacgattctgacgaatgtactgattttatcgaatggccagaagatctcggtgattatggaacacagctgaaagaagccccacccaactccaatgttcgtgcatttcttgccttatgccatggacccctagaagaatggagcaatggacatgcttaa

SEQ ID NO: 634 - protein, 348 aa, unidentified
MATDNSDAKTEQSKVTESKGSSPTKSLPAHAADEKAAVGATFKLQSRQPTEPPAIPSVFAQSQSLNDSVGNPDFIAQLRDEGMYGLFLPRDRARRTPTPVTLRPLTYFQSIERTISQSMFHLLQTKTEFNNDDAIQRINTIAEQLAIGACLATHMKLRALIHLDFPDRYNIGSLKRPKTITDLPVVAPFAFAIQQLGYVNIANLTEERRYVPVLPETGHTFGIPTGHNWNPNLYAQAVDYARKFGLHFNVVDYTKKQGTAWWLLRQHFEDGIFELQLPLPEVNFTSSMALTLSLFLNAEEVNATSEIFDLTPVGADIYGYIMREPHLGINVSTFEVIDESAKEIVSNV

SEQ ID NO: 635 - protein, 346 aa, unidentified
MAFESKTSASESTVNKDAAPAPSSASVKSPVKPSSSGLGRAKTETPHLPASNYEIPRYTRDTQPVVGNKNYEFSLRMDGRLGHSMDRSKTARPEVNCSLNRANFHEGVLKVLRQILSEMARLKQDLSDAEIQERVESVSLTLAYGVATMAYLKLRAINLFRPNEASKFLTKPKVPDHFEIPTPFAFAISQLGVVEVSSLSRRMICYPTADLADASNHLVGNKRNWSQTAYAEAVRYAKYLGMSFSTVDLDIKVGSSWWLFKPDVTDGLLSIRCPLPEDNYTLAGATVFMLFYHDVGSDPAIDLFNIDSLGNDDYGSFIRNPRDGFNASSYYAISSEGTDEMWKSSA

SEQ ID NO: 636 - protein, 347 aa, unidentified
MDTAQTDADKAAGKRGATVPPEGEPAAKTMRFSDAIVPAGPSKDASTVATAALPKDLIQWPIERLATQVNQVFLDTTIQNGEGGYEVPDDQIVPTLRVYEINVTNLRNAFRSVLYTILRAKFIERGDRTVTAATTLATNVSNLTADACMAALYAKLRSLHRQIYTHKGRFTDQPTYTKDVELPLPFAVAIDGIGMFRTSAMSTRFNVVPVYPENTKNEGRSHDSINFLEYKSYLAYFAEIGIPTRTIDTRVTPGNAWWTYRTSYDGDVYDLKINFPPLHFNDHLANLAIMFLGNSGADRNNASIITTKTDDQDYGWYVKDIREGEQARAFAALCQWDPRYWNEKNNV

SEQ ID NO: 637 - protein, 348 aa, unidentified
MDKDAAAAQTEQSKITESHGSSPEKNAAAHTADQKAAVGSTFQLQSRKPTEPPTVPSAFAQSTALNVSVGNADYIAEQRDEGKYGLFLPRDRAHREPEPVTMIVGNFFDGIVRTTERAMVYLLQKKSEFNDIDVLQRVHAVAEQLAIGAMLATYFKLRALIYLDLPDRYTLGSLKRPKAIADLPVIAPFAFAIQQLGYVNVANLTRERRFVPVFPEDDHTFGVPLEHHWNPNLYSQAVDYARTLGLHFNVVDYKKKQGTAWWLLRQHYEDHVFELQVPLPEVNFTSAMAITHTLFLEGEAADPSNAVFDLTPVGADTYGYILREPHFGINVTTYQVIDGSAQEIVSNV

SEQ ID NO: 638 - protein, 346 aa, unidentified
MASSKRTPPLVAQQPKKRRFETVFDLGPSLGSTSLAMVHVPQPTPMLTDEAEQMAELLFRERSRIELDINPAYVSELELRREVGFSPMIANKTLAFTTYDLRVVEFRRCITAVLTGALKARYFDRSNLRQAEITAEINTIVPLTVSACMCALYSKLRSIHRTHGRLSARYAAAPHYNKDIELPLPLAVAIQEFGIFKTESMIQNRIMAPTYPEATQYEGRAQDNFNITDYQTYIPTFKDLGIPCKSVDPHIKSGSAWWTYKLNNAHGTTDLVCTIPPTNYSDLGVALRSLFLATAADSDECSEIIAWPEGTADFGTNLRENPPNSNIRAFLALCHGPLEEWSNGHA

SEQ ID NO: 639 - protein, 489 aa, Beet cryptic virus 1
MENNTPLANPSGPNVPSAAAPPTPAPPAIPQATPTPGAVSQPPAPPARRSRTPRGPVPQATPGSTSGAPALLELSAGLPMYTVPRRGVNTFVPDAQMLFHVLGICDQMMLSTDRFTRSSPAWIPIVSQLYISVLWMVAILRVFVASGYGALYSSLINDLIGHLRIDECMIPGPLVPFFQSLGAVCGPYEWIGDIVAAFPDFLTLWDAENFCPTADLARTCPVPAIMLDQLHYFATWTIPAEQILYTNFQWYRNIFSLGLGAGNANNRIGPQLCGSLYSPRAQVDSARAFWNAALSSGITRTNAAEANGAFYTYAQLLGFISQNGTLQLDWFQQVAVVMQKYTQYFNGSTPLKSISTIGIGAVAVIGAPTPDPATRDWFYPAATGIEPFLCSRFAPRREIPNTLGMIFSHADHELEEQAEQYAILTHTNIRWSPSVVAQNAWTAVNDGASRNGDYWIMMNYRFSTRISLKTQFAQVIASRYHQQAANRVD

SEQ ID NO: 640 - protein, 374 aa, unidentified
MENGANNPPAAGAIVAAVQPALPPGLDASKLNRATEYLYDADKIRPHRARSPKYRRYMQLKKNEIYVQLIDIYRASFSVTWPDFRHLIHAFPPPANHEPQTYYACCYISGWFRDLYYHIRKALKSLSGLAELEYYRDPIPQMSFEYDNFLALLGAAIRPTHIVGNPEDVMYVPLISEATDVNQVNPFGINNYVHQPELFSAIVATMKDRKKFNMVPLPSNYSGRPSWLFDWHAEDQICAPFQPEGNFNNEDIAMAFVLGTACTSLIGMRDRDDWQFYPNANVPAHFNPHTAQRITPRTMYGSYEVRSYETDHDYYIPSNSAGVTAFLSGPSTSRKRSRTTSSSTPGSLVICKYICLYPYRLHYLPVHINISLFN

SEQ ID NO: 641 - protein, 673 aa, Primula malacoides virus 1
MSDTVLQAKTNFLKNKSPVLSVQESKRPKISRDLMPLFQSNTAARSDSSNQWTIDVFPNMVPITMYIMLTSIAHANDVDHRTTSKVSVATICMYHLSIVYGYFLLNDMITRASASAHARPWIETSWKREFADFLLTLPVPEFLTPFLSQFQHFTTDRTKNVFLTPSAAGFDHNIFFGRVFPLNMFSAIHDCTATLPGNTPRIQVLQDLYSRVLYTITAPGFTCLIPDLIGVTIDQTTPTTANYMNSKLYQVYTAVFNPVLFRDFQHRSSLAALSFQSPVFANNHVNAYDLLFSASAANLRELKVVLQVVSTVLDGKVTTSGTLGDFLTKPSGALAIKHGYSTYALPTWSYNTNATKSAVYSAITTLTLTSERDRAQDICFLQRPAAAFNATTEVTDVTYAATATPNQAVQLPTGHQLTRHFPFSLLQVPNGAEPFPRHDNDDLVQFSDFVHTAPSVLVLDTDGELTISAHLPLLAGKIIESFEIDGSTIEMPNVDKSLGLQNCLFADSAVSYRLVRPGSAFHPQPAGSINPPLNRVRPNPRPRLPASSLLYDRTEIMLPNMNNRIVEARAPDTLPGMTRRAAVNFLRYAQSFFGFHTVDSSSNALSLDTIPGMTNGLLHLWSPYSYTPFENDYFPDPDLAESRHYFLSNLRTIFGTDYNLVQAKHPYEALPVV

SEQ ID NO: 642 - protein, 337 aa, Fig cryptic virus
MAAPNFDILEDLIADGRLQITPYVTSTEPKIFDVDFDALWNRINAIIVPIYTNWDQLRFHYPGTTTTVTNNITLDVGHLVTFALWQLYNRLRSVAECFHHPTRTSRMNTRAPISNRMEFPSFLSSMLESISWLRINDGPVDYLALFTAPTGTSNNYGRSTVQVPDNGCYDRLTGKLRALGVQLTPIDMTPSAGSFWPTTQVITEEELYNIVGTFHSSHYVNEDAIRAIFLAGTAHSQPFPDFGMTVGFVTDRTVMDPLAALAAPTGTPRSEEATSAGRPVHGMYNVNHRGIQPAAGEQNPSGCYIIGRGYERRYTCYLARRIAVFEANRIIRYRFMR

SEQ ID NO: 643 - protein, 415 aa, unidentified
MADQGNNETPLPVQATQPAANSDRIPITTLPAPRSQAPNKPEYARIADSLEDEYQIGFQRINPRLHRRYVILRSQELHDRLCNLYAPYFQAGYRVFKHVIEAYPLPAGYASQIAYATACYVSSWCWDLYVSIRESVKKLSQTAFLQQYQTEQFHSQDRYDPFLQHLNTVIRPTHIPGGLEDSLYIPLIANHVQWGNQSPFGINHYAINESLVQGLLDVMDLKNNTWRTVPLSHDTLGRPMWLLDWRQNQAYAWFPQENHFSKEDLIAAHILGIPCSPRLGPRDVDDWQFFPGNVMPQHINIAAYERAIPRRFFGAAEYRTISTRMWELPFLSAVAGQMSGAKRPAPESSATGSGYMESPPAVEGQQTAAIMDPGIMQTRYCQYQIIDWCYHGRVILNLNAQKQNQALRSILFSPN

SEQ ID NO: 644 - protein, 673 aa, White clover cryptic virus 2
MSPDENPTLNKTPKNQTVELVFQDTKVPVPSDNFMESIRSNAAAHTDTANQWIIDVFPNMTPILLYVMHYTHLYAQATEYRIHAKSSVYTLCMYFMTIVYGYFLLNDIYTRPARSVHARIWIESSWRSEFVKFLTTLPVPDILKPILSQFHPFTTARTKNVFFCPSAAGFDHDQFFGRTYPMNMFAAIHDCTATLPGNSTRTDVFRDLYSRILYSITTPAYTCVIPDLIGATPDQTTRTTINFMNSRLYQTFNSLFNPVLFRDSQRRAALAALSFTAPTYPTNHINAYDYLFSATAPNLRELKIVIQSVIACSKGVFDVSGTLGSYVSDYSSSSIVHHGYSTYPLPVWSHTDDATKPQTFTAATIFQLVTEDARAQDICFLQRPAAEIAHTRRITDLTYASTATPTVPATMPANHGIFRIWPYCLRCDNDAENGFPRHDNEDLVAYSDEIHTAPSVLVLDTPGDTVISAHMPTVVGKVIESFELDGSTIAMPDARKSLAMQNCMFADSAIAYKYVRPGSYWRPRAAGSILPPLNRALPTARPRLPASSLLHDRTKVFLPQLNAHVNAIPENNLLPGFTQLTPVNVIRYVQPFFGFHTVDRTANDAALDAVPGMAEGHLMIWSPYTYNPYESDDYPPVALDASRHYYLTNLRTIFGTDYNLVSVKHIYESYPAV

SEQ ID NO: 645 - protein, 673 aa, Red clover cryptic virus 2
MSTEETLPPTKTIKNQNVNLIFQDTKVPIPSDNFMELLRSNAAAHTDTSNLWVIDVLPNFTPILMFIMHYAHIHAQAADYRVHAKSSAYTLCMYYMTVVYGYFLLNDLHTRPTRSVHARVWVESSWRSDFVKFLTTLPVPEFLKPILSQFHPFNTDRTKNVFFSPSAAGFDHDQFFGRIFPMNMFAAFHDCTATLPGNSSKVDVLRNLYTRNLYTITAPGYTCMIPDLIGITPDQAAATTVNYMNSKFYQTFTSIFNPVLFRDSQRRASLAALSFTAPTYPTNHINAYDYMFSATAPNLRELRIVLQSIIAITKDVFKSDQTLGNYVADYSSGSIIHHGYSTYALPTWSHTPTTGKFDRFNTANTFNLVTEDARAEDICFLQRPAAEIPHTRLITDIVYAATTAPATSLTVPANHALYRRWPYCLRLDEDAANGFPRHDNEDLVAFSAESHAAPRVLVLDTPGDTVTSAHLPTLTGKVIESFELDGSTIEMPDARKSLGMQNCMFADSAIAYKYVRPGSYWRPRAAGGTLPPLNRAPPNSRPRLPASSLLHDRTKVFLPQLNRHVNAVPDNDALPGFTQITPVNVIRYIQSFLGFRTVDSSANEAALDAVPGMNESLLMIWSPYTYNPYESDDYPALAYDASRHYYLTNLRTIFGTDYNLVATKHIYESFPAV

SEQ ID NO: 646 - protein, 673 aa, Hop trefoil cryptic virus 2
MSTEETAPQTKAIKNQNVVLSFEDGKPPGPVSDFMSLFRSNSCAHTDTANQWIIDVFPNMTPILMYVMTKAQHHSEATDYRLHSKSSVFTICMYYMSIIYGYFLLNDLHSRPTQSAHARNWVENSWKSSFAKFLMTLPVPEFLLPILAQFHPFNTDRTKNVFFSPSAAGFDHDQFFGRVYPLNMFAVIHDCTATLPGNSTRTQVLQDLFSKVLYTVNAPGFTCLIPDLFGLTLDQTVNTTVNYMNSRLYQVFSSLFNPVLFRDSQRRSSLAALSFTPPTYTTNHINAYDYMFAAYPANLRELQVVLQSVSAIIKDVAECKIPLGTYVADYSSPSIIHHGYSSYALPTWSHSETEQKVDRFENATTFNLVTEDARAQDICFLQRPTQAIPHEHNVTDLIFTAAGAPDTDIPLPANHAIVRRFPFCLRLDAPAENGFPRHDNEDLVKFSDDTHSAPGVLVLDTIGDGVLSAHLPTLTGKIIESFELDGSTIEMPDVRKSLGMQNCMFADSAVAYKYVRPGSYWHPRAAGSTLPPLNRAPPNSRPRLPASSLLHDRTKVMLPQLNVRINAALNDNALPGLTRVTPVNVVRYTQSFLGFRTVDSSNNAANLDAVPGMTEGLLMLWSPYTYTPYESGDYPFADLSASRHYYLTNLRTIFGTDYNLVSVKHPYEAFPVV

SEQ ID NO: 647 - protein, 673 aa, Dill cryptic virus 2
MSSTSLTSRLNALKTKTMNLTFTDVKAPVPSADILELFRANTGARADSCNDWTIDVFPNMTPIMMYTMLMSIRHANATQQREHSKASVATICMHHMAVIYGFFLVNDLHVRPAPSAHARSWAETSWKDDFVNFLMNVPVPEFLTTILSQFHAFETDRTKNVFFVPSAAGYDHDQFFGRVYPLNMFATIHDCTANLPGNSSKIDVLKDLYSKVLYSIQVPNFTCCIPDLIGVTISQVTNTTANHLNSKLFQVFNSLINPVLFRDFQRRSTLAALSFKSPTYQTDDINAYDLLFSATPANLRELKVVMQAVSAVLADSVPCKSTLGRFIAENSSSAIIKHGYSTYALPTWSHNENSNKSSLFAAVTTHNLVSEEXRAEDFCFLQRPSQEIPHTHELNDLRYVADTDKSTAVALPANHSIIRTFPLCLRYNSSQKDGFPRHNNNDLIKFQDEIHTYPSVLVLDTDGDLTVTAHLPLLAGKIIESFEIDGTTIEMPNTFKSLGMQNCMFADSAIPYKYVLPGSYYHPRTTGTVLPPLNRAPPNSKPRLPASTLLHDRLKIMLPRFNVAIAEQNIGNTLPGMTPIAPVNVLRYIQSFLGFRTVDASSNAATLDAVPSMPTDRLMVWSPYTYTPYEPDDYPIPDLGASRHYYLTNLRTIFGTDYNLVQTKHPYEALPVV

SEQ ID NO: 648 - protein, 490 aa, unidentified
MDPNVPIAQPNGPAIPNVAAAAANPPPPIQPAPPAPGAVQQAPAPAPRRNRLPHGPVPTSSRTAVTSAPALLELAAATPMYTEQRRATNFFVPDSQMLFHVLSICDQMMNSTERFLRSSPAWMPIVSQLYISVLWNVMILNVFVNSGYGSAFSSFLSELYGVLRIDECMIPGPLVPFFQALAAVNGPFDWIGDIVPGLPNFSALWNEAGFYANSNYARQVPIPALILDQLHYFSQYAIPANQQSTYATFEWYRNVFQQGLGAMNRLNRIGPQLCGSLFTTQAEYDAARNFWNASLNTGITRANAAEGQPAFNNYRQLFGFESQLGALQLNWFTSVSIAMNKYTQFFNGSVPLKSILPTGIGAVVIAGSPVNNPSTRTWIYPPDTSIEPFTTTRYPPRREIPDAMAIQFAHSDHELEEQAEQYAMLTHTNIKWHANLTAQNNWTAITADGLYLGDYWNMMPYRFFAPLHYKAQFAQIIASRYHQQAANRAE

SEQ ID NO: 649 - protein, 487 aa, unidentified
MNHNTPPADANGPALPEGSVPPPNPPTHIPVAPAAPGAVQTPPAPPARRNRQPHGPVPAASNHHAPGAPALLELSAAYPMYTEQRRGVNFFVPDSQMLFHVLGMCDQMMNSTDRFLRSSPAWLPIVSQLYIAVLWNVMICRVYINTGYASHLAPIIDVLISHLQIHECMIPGPLVPFFQSLAAVNGPFDWIGDITPAMPAFASLWNAEQFTARDSYARQIPIPAIILDQLHHFATRAIVAGVANYGTFEWYRSIFNRGVGATPANSRLGPQLCGSLFTTNAQFDAARAFWNSALASGITRTDAARPPLVNYAQLLGFQAQDGSDQLNWFQFTSSVMQTYCQYFNGSVPLKSISLTGIGAVVTYGIPVNNVATRNWFYPTAAMIEPFATSRYAPRREIPNQLAVKFQHADHEVEEQAEQYAILTHTNIKWYESLITQNALTAVTGNLVHQGDYWRMMPFRYSSPISLKVQYAQIIASRYHQLAANRAE

SEQ ID NO: 650 - protein, 394 aa, unidentified
MTTGDRVTPTDGITTVDAPTATLEAKLDSSSTAYLKSATDFLTQSSRIGTLRTSYKDRRRYVYLKSQAMFDSLVELYSLLFTTQWQVFRRFTDIFVPPANVTATRYLAMNYISMWIQDTYAMNRAALMKLSVVALNDRFPVEIPIVGYQYDAYLAHLSAALRPTLTKHMMEDTLWIPCFTRSPNFQVESPFGITGYVINDVIFTGAMNIMKERKLWRIIDLPTNVLGRPSWLFDWHDDDRVCAWFPMEGNFTMDDVTMAYILGVACTPKLAPCDVDDWQYFPNDVVPANLDPYAFLRLTNRRFHGGYEIRTLDAANMPGQTGTTTDSRKRPRPGESTSAPALPQTSEPQTQMQVDTPPAPKPRFRLVDWTYHYLVVLNKEDHTRFAALKSICWN

SEQ ID NO: 651 - protein, 487 aa, unidentified
MSMKRKSRPSSSTKDLEVEDTYLKQSGLDSMNKLEPVEQSKDEETTKVSMLPTASTAIIAPRKLTAEDFSSKRKPDQTSAVSPFFGFLRTHILHPTQGRLSHYYPSCHMMDYILHSINSTLCDNYYFKRETPNYHPYILRLYFGVLFWVQCLRAGNDVQVINDLHYDFLQRFLDCNPLESLAIPGPLLGLFKTLCSSQPEFPHYGKVYPRIPASPGPRRRDMFSKNVPSAQFLPNVPGIFALIHHLHGLSEGEHPIYPKRKRHIPVTEEASNFGFKAFAAFPNRIQRDRWMVSSPGLQYPCEADMKMNEAFAERFYDFDFPAFNADDNLSTITNFLHMRKSMAWFIRAKEVACSAARFFSDSGTLADCSPHGLVSNQIIVAITPPPEETFADPRFSADPRALYPFSFKLKSTAHNLPPLAEAAAAFSQTHIRIFPEYPLAGNFGQKTDESGPFWDIRPIGSSPTDDTSYLTIPPMVKAALIEKGSSR

SEQ ID NO: 652 - protein, 672 aa, Cannabis cryptic virus
MSSSTITSRLDALKSKNVIIEFKEAKTPVPSADILQLFADNTAARSDSSNEWIIDVFPNFTPILMYIMLNAIRHANATAQREHSKSSVATICMYHLSIVYGFFLINDLNVRPAPSAHARIWAESNWRSEFVKFLSTLPVPEFLIPILSQFHAFETARTKNVFFIPSAAGYDHDQFFGRVYPLNMFAAIHDCTATLPGNSSKIDVLRDLYSRVLYSITDPAYTCVIPDLIGITLSAADITQAQYMNSKLYQVFSSVINPVLFRDFQRRSSLAALSFKAPTFASANVNAYDLMFSATSANLRELKVVLQSVHAVISDDVSCKTSLGQFIADATTSTIIKHGYSTYALPTWSHSEVTNKAQTFRAITAQQLISEDARAQDFCFLQRPAAEIPHTHNLEDVRYVRTDAPTEPVALPQNHSIIRNFPLCLRNNANAAVFPRVDNNTLINFSEEIHTVPSVLVLDTDGDQTITAHLPLLAGKIIESFELDGTTIEMPNAMKSLGMQNCMFADSAIPYKYVRPGSAYHPVNAGTILPPRSRATPNSTPRLPASSFLYNRLRVNLPRFNLAINEERIGNILPGMTLLDGVTVLRYVQSFLGFNTVSRADNADNGDNVPAMPRNLLLVWSPYTYTPYESDDLPEPALGESRHYYLTNLRTIFGTDYNLVQAKHPYESLPVV

SEQ ID NO: 653 - protein, 488 aa, unidentified
MNPETPLADPNGPTPPHGAAAQPTPGQHIPAGTPSTGAVHLTPAPQPKRNRAPRGPFDNASSTSAPGAPALLELAAAYPMSTEQRRSPNTFVPDAQMLFHVLSLCDNMMLSTDRFTRSAPAWLPIVSQLYISILWFTMILKVYVNSSYGAMHAHLLNILVAHLRIDECLIPGPLVPFFQSLGAINGPFEWIGDIVPIIPEFSQLWNTTSFYPTDSFARIFPIPAILLDQLHYFASITVTEQETIFGHFEWYRNIFSLGQGTFNPRLRLGPQLCGSLYATESQVTNARTFWSAALRTGITRTNAAANQPLFSSYPQLLGFVDQNDAMQLDWFQHTAIVMQKYCQYFNGSVPLKSISPTGIGAVAVHGYPNYSGAARTWMYPATNTLSSFKSSRFSALREIPALLTVRFEHADHELEEQAEQYAIATHTNMCWSKNLTTQNNWTQVAEANVHSGTYWSMTPHRAHASVRLKTQYAQLVASRYHQQAANRV

SEQ ID NO: 654 - protein, 430 aa, Pepper cryptic virus 2
MATPVSDTPTTKSTQDKTDQLPAATPPITQKPPSYKSEISRIADYLADDYEIGYVRDRPPKHRRYAVLRTQALFNKLIEIYGKLFKQNWEFLRRSIDGFTTAVGIRERQWENAAHAYISCWFFDLYVSVRNAVEKVSGTAFTQYYHAHAAHILHEYDALLVHLNAIIRPTHIKLALEDCIYIPRIATNMNITNPNPFGLTEATWDRDADFAYSIMDRMKAPGSRWRVEPLVTDTLGRPGWLLDWHQVGAQQQAYAWFPSEGNYSMEDLIAPHIIGEALTPLMGPCDIDDWQYFPNFIRPANVPWQNMERVSARRFRGSAEVRTYAEEKVNLTRFTSTGHETSKKRSKPSSTTTTSSQGGSRDMETEDEPREVVTDITLSQVTSTQQLQTLMTTGEADRFRIIDYTYYCCVILRNTAQKRDGAIRSFCFKQ

SEQ ID NO: 655 - protein, 411 aa, unidentified
MAENDIPAEGIPARPPPAANPFTGLNRDELDRIVEQPEEDNQIGLFRDKARSYRRYVDLRTSPLSTRLINLYSNLFTTHWNVFKHTMSGEAPAGFASKAIYLATIYVSAWIWDLHVSIRESVRRISGTAFNQLFQQDAYHQADRYDPFLQHLNTIIRPTPIHQALEDTLYIPVVSRNIDWANANNNVFGLPSHAYDDNILNAILDVMDDRRNQWSTIPISTNVLGRPGWLLDYRLGQAYAWFPMEANYSQVDLIAPHILGTPCTPRLGPRDKDDWQVFRYNAAPPPGVRLNPHDFRRATERSFYGSAEYRTIEHAVHVFDWQATIPPPDAATSAASQPGKRKQGDSSTSAMALMETDKDPPQPFVPPPPVDLNRYRLIDWCYHARVIDGEDQQTRNRALRNFIFQAGHQPT

SEQ ID NO: 656 - protein, 412 aa, Pepper cryptic virus 1
MGDRVNAQDDDTVVPHQAPLQPAALQQDLTRSADYLLDNVRIGNHRQRYDKYRRYVLLRSSEIFTSLVAIYAHIFSSYWQHFRRFTDQFQAPTGVQLPTFVARVYISTWLHDLYCSIREATRSISPLAFNERYSYELLPYSTEYDPFLAFLSMSIKPTHIQHTPENTLWIPILCENYDWDRNEANHNPFGITNFTLNSNLFYGLLAILKERKEFKLSTLTTNTIGRPCWLFDWHDNVQVCAWFPREANFNSQDVTAAYIIGVACTPKLGPSDDDAWKYYASLNSVPTFTPTEPRLTNRRSYGAYEVRTRETENNYFLPDSLLNIIEDFTATGTTQRRKIRRPSATSASTGAAIIIRDTPGTASTATTSTTETEVTFPPVIRTKIRDWYYHSRVILELEDNSRTAALRMFIIA

SEQ ID NO: 657 - protein, 490 aa, Carrot cryptic virus
MDDNTPAAQPNGPHAPAAAAPHAVPPPAIPPATPAPGAVQQPPAPAPRRSRNPHGPTPISSRVSAPSAPALLELPAATPMYTEQRRSANFFVPDAQMLFHVLSICDQMMNSTERFLRSSPAWMPIVSQLYISVLWNVMTIHVFVNSGYGSAFSSFLTELYSVLRIDECMIPGPLVPFFQALGAVNGPFDWIGDIVPGLPNFSALWNEAGFHANNNYVRQVPIPAVILDQLHYFSQYAVPANQQSTYTTFQWYRNVFQQGLGAMNRLNRIGPQLCGSLFTTQAQYDAARNFWNASLNAGITRANANEGQPAFSNYRQLFGFESQTGVLQVNWFTSVSIAMNKYTQFFNGSVPLKSILPTGIGAVVIYGTPMNNPSTRTWVYPPDTGIEPFTTTRYPPRREIPDALSIQFSHADHELEEQAEQYAMLTHTNIKWYQNLETQNNWTAIAAGGLYLGDYWNMMPYRFSAPLHYKSQYAQIIASRYHQQAANKAE

SEQ ID NO: 658 - protein, 674 aa, Crimson clover cryptic virus 2
MTTNSSNARLNKLKNNTVPLPFNATEVPEPATDLLTSMKENTSAHSATANQWTIDLFPNMIPVLIHVMSAASHHANAINFREHSKTSAATVAMYHMAVVYGYFLLNDLNIRLNPSAHARSWAEASWKSEFVEFLYGLPVPEFLAPILSEYQHFVTDKTPNVHFTPSAAGFDHDQFFGRVFPLNMFAALHDSTATLPSSSTYAQVLQDLFSRPLYTITDPAFTCYLPDLLGITLTAGENVTTLNYINSKLYQVFTTIFNPVLFRDHQRRSSLAALSFKSPTYPNPNINAYDLLFSASVANLREIKIVLQSIYKLFDGRVACKHTLSQFICESTSPSITKHGYSTFPLPTWSHTESDAKAIRFSGVTALVHVSEEDRAQDFCFLQRPAEAIPHVNEVPDIRYATTEDPETAVPLPANHILVRRFPFAIRLRQEAANGFPRHDNDDLTKFSDHVHTAPRVLILDTTGDGIISAHTTTASGKIIESFELDGSTIEMPNADKSLGMQNCLFADSAIAYKYVRPGSFYRPRTQGSVLPPLNRAPPNSRPRLPASSMLHDRTKVFLPQLNTRINEAVDIRTLPGLTMLNNVNCINYAQSFIGFKTVDATRNDDVLDAVPGMPLNNLILWSPYTYTAYEDETYPDPVFSNSRHYYLTNLRTIFGTDTNLIKAVHPYEAYPVS

SEQ ID NO: 659 - protein, 426 aa, Beet cryptic virus 2
MTGPTQAHLIEATSFTGLNRDELDSIVDALQEENQIGTFRDRPKAYRRYVHVRSQELFDRLSELYADLFTSNWSAFKHAYITEPTGREDANSISTKASFMAQCYLTAWFWDTQYCIRESVRKLSGTAYNQHFTEDLNLISPKYDPFLQHLNMVIRPTLIHQSTEDTLYIPLLGQTFNYNEDAYNFLNLQGCGTEIRQVYAITDVMDSRRTEWSTIPLATNVLGRASWLLDFKQGNAYAWFPFESNFTELDLVAPYILGIPCTPRLGPRDEDHYQHWTHNDPPLSTDGNIILNPLAYVRSSERKFFGNAEYRTMEYNSYTQNFEAYMPRVTTSTQAKNKRKKDAAPEQLSTGQGDGSSSSKDAEMSTEESEAPPPPKIPRPRQIHQFRLIDWVYHSRVILGADKAMQRRALWDFIHAGATPSHQPRP

SEQ ID NO: 660 - protein, 393 aa, Beet cryptic virus 2
MAPNDELAANLQGLKRPALDEIVHYLEDRNQIGISHDKNLSYNRTCVLLTNELHARLVTLYTNLFTTSWRHFKSAVRKEMPRTEANPQRWLANCYITAWFWDLQASIQEATKTLSGKIYQDYFRDNIHPILDRYDPFLQHLNTIIKPTHIVNATEDVLYFPIISADYRRADADMNIHRITGAFTRPNVVMDLVSLMDDPNSGWSTVPLNTNVFGRPGWLLDYDGTDAYAWFPMENNYNMCDLIAPHILATPCTAKLGIYDADIWQNCPGNIPITATTARTARRESERRFYGSAETRTIEQRNYTVNFPELLKPRDTGARALVTTTQRASTSGSVEPTTGAQPEPETPTFQITFRQFRILDYCYLAKVIHKSNSQMINKALRNFIQKGASKKTE

SEQ ID NO: 661 - protein, 491 aa, unidentified
MDKSKKYLSDAKEIIKANGLEEKFLAAAGLSSMDELDPKNFAEFEAPAPPQVMKPSIAAAPIIQKPLSKQVADASTGFNPESASDMLRPFIGLKINYKARKTVSTYAPSSLMMDYILHQVNNLLVDNFYFRRACPDYHPYILRLYYGVLFWIQCMRAMNHARLLHAEASQCLSTFLDAFPADSLPISSPLLDLFKTLCCSQPEIPTFGVVSPTLPFHPGPEARSAFMLADATSHVLPNIPGIFALIENLRTCLNPGDGQQPNLPAKGKHIPVTSTAAAATVFGHHQFPILANRSNAEKWSLCSSGLQYPCEADRRLHENFSERLDNFEFPVTAEDDDLRFYSDFLHITNSLAWFAQVRDVAANEAAFFNGSGTLADCPPFGIAANQITAGYLAPIIQVAAPTRSADPASLFPFAIKLETASRALPELAEAMAALAQTNVNIYPTHPYYNHIGAESRRGPFWNLAPVESSITDHSSYLSLREVVRGLMKPKG

SEQ ID NO: 662 - protein, 483 aa, unidentified
MAALGDGVPPIADNNNPQGRDANPIRGGTDPLRRATDWLEDNSKITMTFHRHANYRRYATLRLQEMFNALVQLYQNIFMSHWHHLRRTVENYQVPAPLAQTPWLYVARLYISVWIVDLYASIRRACLRVCPEAYNEYYTQDYQQVVFEYDAFLSQLLSMIKPTVVNLVHETTLFVPRLAEDQPFPADDMNIFGLDRFDYNENVVHGVISILRDRKLMKFEKPSETGFGRPFWLFDWHRTGHAYAWFPAENNYDMRDVTVAYIVGVACTPKLGPRDIDDWQHFPGNIIPEHPRAEDHVRVRPVAYHGAVEVRTIDVQQWTAPPEVMSLIQVTLPPAAAQQQQQQQPAAQAQPAPARQQPPAQQQQQEQGLIRYNLRQGFKRRRTDPSTSNDNDMPVEDIEEPPQPEQGEDPIHPEEEAAPPVEPQPDPAPAPAPAPQAPAEPIITMNRVRRFRIITYCYYRQVTDNEDLHSRLAALRQVDSLIA

SEQ ID NO: 663 - DNA, 1047 bp, unidentified
  source 1..1047: mol_type = other DNA
atggcgactgacaatagcgacgctaagactgagcaatcaaaagtcacggagagcaaaggttcttcaccaacgaagagcttacccgctcatgctgctgacgagaaagccgctgttggtgctaccttcaagctgcaatccagacaacccactgagccacccgctataccaagcgtattcgctcaatcacaatcacttaatgattctgtgggaaacccagactttatagcgcaactgcgagatgaaggcatgtacggcctgtttctgccaagagatcgagcccgtcgcacgcctacaccagtaactctgcggccgttgacctactttcaaagtattgaaagaaccatcagccagtcaatgtttcacctgctgcaaacaaagacagagttcaacaacgatgacgctatccaacgcatcaatacaattgctgaacaattagcaatcggtgcctgcttagccacacatatgaagcttcgagctctcatacatcttgattttccagatcgctacaatataggaagtctcaaaaggcccaagaccatcacggatttacccgtggttgccccatttgcctttgcaatacaacaacttggttatgtcaacatcgccaatctcactgaagaaaggaggtatgtccctgttttacccgagaccggacacacttttggaattccgactggacacaattggaaccccaacctgtatgcccaagctgtagactatgcaagaaaatttggtctccactttaatgtggtagactacaccaagaagcaaggcactgcctggtggctgttacgccagcactttgaagacggaatcttcgagctgcaactcccacttccagaagtgaactttacttcttcgatggctttgaccctatctctgtttctaaatgcagaagaagtcaatgctactagcgagatattcgacctcacccctgttggagctgatatatacggctacatcatgcgcgaaccacacctcggtatcaatgtttcaacatttgaagttattgatgaaagcgccaaggagatcgtatctaatgtttaa

SEQ ID NO: 664 - DNA, 1041 bp, unidentified
  source 1..1041: mol_type = other DNA
atggcttttgaatccaaaacatccgcttccgaaagcactgtgaacaaagatgcagctcccgctccgtcctccgcaagtgtcaaatctccagtcaagccctccagctctggactcggccgcgccaaaacagaaacgccccacctcccggcatctaactatgagatcccgcgttacacacgcgatactcagccggttgttggaaacaagaattacgaattctctctccgcatggatggacgccttggccactcgatggaccgctccaaaacggcccgccctgaagtcaactgctctctcaaccgtgccaacttccatgaaggtgttttgaaggtacttcgccaaatcctctcagaaatggctcgcctcaaacaagacctgtctgacgctgaaattcaagaacgcgtcgaatctgtctctctcaccctcgcttatggagttgccactatggcttatcttaagctaagagctatcaacctcttccgtcccaatgaggcttcgaaatttcttaccaagcctaaggtcccggatcatttcgagatcccaactcctttcgctttcgctatctctcagctaggagtcgtagaagttagcagtttatccagaaggatgatctgctacccgactgcagatctcgccgatgcgtcaaaccacctcgttggtaacaaacgcaactggtctcaaactgcctacgccgaagctgttcgctacgcgaagtatctaggcatgtcgttctcgacagtcgacctggatattaaagttggctcctcctggtggctattcaagcccgacgtaactgacggacttctctcaatacgctgcccacttccagaggacaactacactctcgcaggtgccaccgtttttatgctcttctaccatgacgttggatcggaccccgcaatcgatctcttcaacatcgactctcttggcaatgatgactacggctcattcatccgcaacccacgcgatggattcaacgcctcgtcctactacgccatctcttcagagggcaccgatgaaatgtggaaatcgtccgcttag

SEQ ID NO: 665 - DNA, 1044 bp, unidentified
  source 1..1044: mol_type = other DNA
atggatacagcacaaacagacgctgacaaagctgctggaaaacgtggagcaactgtgccgcccgaaggtgagcccgctgcaaaaaccatgagattttccgacgctattgtcccagctggtccgagcaaggatgcttctactgttgcaaccgccgccctgcccaaagatcttatacagtggccgattgaacggctagctacacaggtcaaccaagtctttctcgacaccaccatccagaatggagaaggtggatatgaagtccctgacgatcaaatcgtcccaacacttcgtgtttacgagatcaacgtgaccaatctgcggaacgcttttcgctccgtactgtacaccatcttgcgcgccaagttcattgaacgaggtgaccgcactgtaaccgccgccactactttggcgacgaacgtctcaaacttgactgctgatgcctgcatggctgcgctctacgctaagcttcgctctctgcatcgacagatctacactcataaaggaaggttcactgaccaaccgacttacaccaaggacgtcgaactcccgctcccttttgctgttgcaattgacggaatcggtatgtttcgcacctctgcgatgagtacccgttttaacgtggtgcccgtttatccagagaatactaagaatgaaggtcgttctcacgactctatcaacttcttggagtacaagtcgtacttggcttacttcgctgagattggtatccccaccaggactatcgatactcgagtgaccccaggcaatgcttggtggacatacagaacctcctacgacggcgatgtctatgatcttaagatcaactttccgccgcttcacttcaacgaccatctcgcaaatcttgcgatcatgtttctcggtaactccggtgctgacaggaacaacgcttctatcatcacaaccaagacagatgaccaagactacggctggtacgtcaaagacatccgcgaaggcgaacaagctcgcgcttttgctgctctctgccagtgggacccccgctactggaacgagaaaaataatgtctga

SEQ ID NO: 666 - DNA, 1047 bp, unidentified
  source 1..1047: mol_type = other DNA
atggataaggatgctgccgccgcccagactgagcaatcaaagattacggagagccacggatcttcacctgagaagaatgccgccgctcacactgctgatcagaaagccgctgttggatcaacctttcagctgcaatcccggaagcccacagagccacccactgtaccaagtgcgttcgctcaatctacggcacttaatgtgtctgtgggtaatgcagactatatagctgaacaaagagatgaaggaaaatatggcttgtttctaccaagagatagagcccaccgtgaacccgaacctgtcaccatgatagtcggcaatttctttgatggaattgtacgaactactgaacgtgctatggtttaccttctacaaaagaagagcgagttcaatgacatcgatgttttacaacgcgtccacgccgttgctgaacaattggccattggtgcaatgcttgccacatactttaagcttcgcgccctcatttacctagatctccctgatcgctacactttaggaagtctcaaaaggcccaaagcaatcgctgacctaccagtgatcgcccctttcgcctttgcaatacaacaacttggttatgtcaacgtcgccaatctcaccagagagaggaggtttgtcccagtctttccagaagacgaccacacctttggagtcccccttgaacatcattggaaccccaacctgtattcccaagctgtagactatgcaagaactcttggtctccactttaatgtggtagattacaagaagaagcaaggaaccgcatggtggttacttcgccagcactacgaggatcacgtcttcgagctgcaagtcccgctacctgaggtaaactttacttctgcgatggctataactcacactttattccttgaaggagaagctgctgacccatcaaacgcggtattcgatctcaccccagtcggagccgacacatacggctacattctgagagagccacacttcggaatcaatgttaccacataccaggtcattgacggaagcgctcaagagatagtttcgaacgtgtaa

SEQ ID NO: 667 - DNA, 1041 bp, unidentified
  source 1..1041: mol_type = other DNA
atggctagctccaaacgaactccgccgcttgttgcacaacaaccgaagaaacgccgtttcgaaacggtcttcgatcttggacccagcttaggatctacatccctcgctatggtacatgtgccacaaccgactccaatgctaacggatgaagctgaacaaatggctgaattgctatttcgcgaacgctcccgaattgaattggatattaatcctgcttatgtcagtgaactcgaacttcgtcgtgaagtcggattttctccgatgatcgctaataaaactttagctttcactacttacgacctacgagtcgttgaattcagacgctgcatcaccgccgtccttaccggagccttgaaagcacgctattttgacaggtctaaccttcgtcaagctgaaatcaccgctgagataaacacgattgtgcctctcacggtgtctgcatgcatgtgcgctctttactcaaagctgcgttccatccatcgcacacacggtcgtctatcggccaggtatgccgctgctcctcattacaataaggacatcgaattacctctacctcttgctgttgctatacaggaatttggaattttcaaaactgaaagtatgatccaaaaccgaatcatggcaccaacataccctgaggccactcagtatgaaggacgtgctcaagataacttcaacatcacggactatcagacttacatcccgacctttaaggacctcggaattccttgcaaatccgttgatccccatataaagtctggatccgcttggtggacttacaagctcaacaatgcccatggcactaccgatcttgtctgtactatcccaccaaccaactactccgatcttggtgttgcgctgcgctcactatttctggctactgctgctgactctgacgaatgttcagaaatcatcgcctggcccgagggcactgccgactttggcaccaatctccgcgagaacccacccaactccaacatccgcgcatttcttgccttatgccacggacctctagaagaatggagcaatggacatgcataa

SEQ ID NO: 668 - DNA, 1470 bp, Beet cryptic virus 1
  source 1..1470: mol_type = other DNA
atggaaaacaacactcctctggctaaccctagcggccccaatgtaccctccgctgctgccccccccacccccgcccctccggcgatacctcaggctacccccactcccggtgctgtctctcagccccctgcccctcctgcccgccgaagccgtactccgcgtggccctgttccccaggctactcctggctccacttctggtgcccctgctttgctggaactctcagccggccttcctatgtacactgtgccccgtcgcggtgttaacacctttgtccctgatgctcagatgctattccatgtccttggaatctgtgatcaaatgatgctttcaactgatcgctttacgcgttcatctcctgcttggatccccatcgtctcacagctttacatctctgtactctggatggttgctatcctcagagtctttgttgcctccggttacggagcactctactcttctcttatcaatgacctcatcggtcaccttcgtatcgatgagtgcatgattcccggacctctggtcccgtttttccaatctcttggtgccgtttgcggcccatatgaatggattggcgacatcgtcgctgcattccctgacttcttgactctttgggacgcagaaaacttctgccccactgctgaccttgccaggacctgccccgtccccgccatcatgcttgaccaacttcactattttgctacctggaccattcctgctgaacaaattctctacaccaactttcaatggtatagaaacatcttcagtttaggccttggcgctggcaatgcaaacaacagaattggtcctcaactttgcggctctctttactcacccagagcgcaggttgattccgcccgtgccttttggaacgctgcactctcttctggtatcaccaggactaatgctgccgaagccaatggcgctttctacacttatgcccaactgcttggatttatcagtcagaatggaactctccaactagactggtttcaacaggttgccgttgtcatgcagaagtacacacagtacttcaatggctccacaccccttaaatccatatcaactattggcatcggagccgtcgctgtcatcggcgctccgacccccgaccctgctactagggattggttctaccctgctgccactggtattgaaccgttcctttgcagccgcttcgccccaagaagagaaatcccgaatactctcggtatgatcttctcccatgctgaccatgaactcgaggaacaagcagaacaatatgctatcctcacccataccaacatccgttggtctccttccgtggtcgctcaaaatgcgtggaccgctgtcaatgacggcgcgtctcgcaatggtgactattggatcatgatgaactaccgtttttcaacgcgtatttcactcaagacccagtttgctcaagtgatagcctcacgttatcatcaacaagcagcaaaccgcgttgactag

SEQ ID NO: 669 - DNA, 1125 bp, unidentified
  source 1..1125: mol_type = other DNA
atggaaaacggagcaaataatcctccagctgccggcgccattgtcgcagcagtgcaacctgcactccccccgggtctcgacgcttcgaagcttaatcgtgctactgaatatctgtacgatgctgacaagatcagaccccatcgagctagatcaccaaagtaccgtcgctacatgcagctcaagaagaacgaaatctacgttcagctcatcgacatctatcgtgcatctttctctgtcacttggcctgattttcgccatttgattcatgctttcccgcccccggctaaccatgaaccccaaacgtactacgcttgctgctatatctccggatggtttcgtgatttatactaccatatccgtaaagctcttaagagcctttctggactggctgaactcgaatattatcgtgacccaatccctcaaatgtcatttgaatatgacaatttcctagctctactaggtgctgcaatccgcccgactcacattgtcggaaacccggaagacgttatgtacgtccccctcatctctgaagccactgatgtgaaccaagttaatccatttgggatcaacaactatgtccatcaacctgagctcttctctgccatcgtcgctacgatgaaagataggaagaagttcaacatggtccccctaccctctaactactcgggacgaccttcttggctctttgactggcacgctgaagatcaaatctgtgccccctttcaacccgaagggaattttaacaatgaagacattgctatggctttcgtcttagggaccgcctgcacttccttaatcggaatgagagaccgtgatgattggcaattctatccaaatgccaacgttccagctcacttcaatcctcatactgctcagagaatcactcctcgcactatgtacggatcttatgaagtcaggtcttatgaaacagatcatgattactacatcccgtcaaactcggcaggagtaaccgctttcctctcaggaccctccacgtccaggaaaaggtctcgtaccaccagctcctctaccccaggctcactggtcatctgtaagtatatctgtttgtatccataccgattacattacctccctgttcatattaacatctcactatttaattag

SEQ ID NO: 670 - DNA, 2022 bp, Primula malacoides virus 1
  source 1..2022: mol_type = other DNA
atgtctgataccgtccttcaagctaagactaacttccttaagaataagtcacctgtccttagtgtccaagaaagcaaacgacctaaaatctcacgcgacctaatgccacttttccaaagtaacactgctgctcgctctgactcatccaaccaatggactattgatgtctttccaaacatggttcctattactatgtatatcatgctcacctcaattgctcacgccaatgatgttgaccaccgcactacctccaaagtgtccgttgcaactatttgcatgtaccatctctccatcgtctacggttatttccttctcaatgacatgattactcgtgcctccgcttctgctcatgcccgcccctggattgaaacttcctggaaacgcgaattcgccgactttttgctcacactccccgtccctgagtttcttacgcctttcctttctcaattccaacactttactactgatcgtactaagaatgtcttccttacaccttctgctgctggctttgaccataatatattctttggccgtgtctttcctctcaacatgttttctgcaatccatgattgcaccgctaccctgcctggtaatactccacgcatccaagttttacaagacttatatagtcgtgttctgtatacaattactgctcctggcttcacttgcttaatccctgatttaattggtgtcacaatcgatcaaaccactccgactactgcaaactatatgaattccaagctgtaccaagtctacaccgccgtctttaatcctgtcttatttcgcgatttccaacatcgttcatcacttgctgctctttcattccagtctcctgtgtttgctaacaatcacgtcaacgcctatgatttactgttttctgcttccgccgctaatttacgcgaattgaaagttgttctacaagttgtctctaccgtccttgacggaaaagttaccacatccggtacccttggtgatttcctcacgaaaccttctggtgccttagctataaaacatggttattcaacctatgctctaccaacctggtcatacaacactaacgcaacaaaatctgctgtctatagtgctattacgactttgactctcacttccgaacgagatagagcccaagacatttgtttcctccaacgccctgctgctgcatttaatgctacaactgaagttactgatgtaacttatgctgctactgctactccaaatcaagctgttcagttaccaactggtcaccaacttacaaggcacttccccttttccttgctccaagttccaaatggtgcggaaccttttccgcgccatgataatgatgacttagtccagttttctgactttgtgcacactgctccaagcgttctcgtcctcgatactgatggtgaattaaccatctctgctcacttgccactccttgctggcaaaattattgaatctttcgaaattgatggttctaccatcgaaatgccgaatgttgataagtctctcggcctacaaaactgtctgtttgctgactctgctgttagttatagactagtccgccctggctccgcttttcacccgcaacccgctggatcaataaacccccctcttaatcgagttcgccccaacccccgtccccgcttacctgcgtcaagcctgctctatgatcgtactgaaatcatgctcccgaacatgaacaatcgtatagttgaagctcgtgcccctgataccttacccggtatgactagacgtgctgccgtaaactttttacgttatgcgcaatctttcttcggttttcacaccgtagattctagttcaaatgctctttctcttgacaccattcccggaatgacgaatggtctgttacacctctggtctccatactcttacactccgtttgagaatgactactttccagacccagacctcgctgaatcaaggcactacttcttgtccaatctgcgtaccatttttggtactgactacaatcttgttcaagccaagcacccttatgaagctctccctgttgtttag

SEQ ID NO: 671 - DNA, 1014 bp, Fig cryptic virus
  source 1..1014: mol_type = other DNA
atggcagcacccaatttcgacattcttgaagacctcattgctgatgggcgcctccaaattaccccttatgtcacctcaactgaacccaaaatatttgacgtcgatttcgacgcactctggaacaggattaacgctattatagttccaatttacactaattgggatcaactcaggtttcattatcccggaacaactactactgtgacaaacaacatcacccttgacgttggacacctagtcacatttgcgctctggcaactttataacagactccgatctgttgctgaatgcttccaccacccaacgcgtacctcgcgaatgaacacacgagctccaatttctaacaggatggagtttccaagctttctttcttctatgcttgaatctattagctggctccgtattaacgacggacctgttgattatcttgctttatttactgcacctacaggtacatcaaacaactacggaagaagcaccgttcaagtcccagacaatggctgttacgaccgcctaactggaaagctgcgcgcacttggagtacagcttactccaattgatatgacgccatccgctggctcattttggccgactactcaagtcataactgaggaggagctatacaacatcgttggcacgtttcactcatctcattacgtcaatgaagacgcaataagagcaatcttcctcgcagggacggcacactcacagccatttcctgactttggaatgactgttggattcgtcaccgacagaacagtcatggacccacttgcggcactagctgcaccaactggcactccaagatctgaagaagcaacatcggcaggcagacctgttcatggcatgtacaatgtcaaccaccgcggcatacaaccagctgcaggtgaacagaacccctcaggctgctacatcattggtcgtggctatgaacgccgctacacatgctacctcgcacgccgaatcgctgttttcgaggcgaaccgcattatccgttatcgctttatgcgttaa

SEQ ID NO: 672 - DNA, 1248 bp, unidentified
  source 1..1248: mol_type = other DNA
atggcagaccaaggtaataatgagactcctctaccagtccaggcaacccaaccagccgcaaacagcgatcgtataccgatcacgaccctccctgcccccaggtcacaagcccccaataaacctgaatacgcacggattgcagactccctggaagacgaatatcaaatcggattccaacggatcaatccacgacttcaccgtcgttacgttatcctcaggtcacaagagctccacgaccgattgtgcaacttgtatgcaccttattttcaagctggatatcgtgttttcaaacacgttatcgaagcttacccactaccagcgggatacgctagtcaaatagcatatgccactgcgtgttacgtgtcttcgtggtgctgggatctttacgtctcgatccgagaatcagttaagaagctatcacaaacagcgttcctccaacaataccaaacagaacaattccacagccaggaccgctacgacccattcctccagcatcttaacaccgtcatccgacctacacacatccccggtggtttagaagattcactctatatcccacttattgctaaccacgtgcaatggggaaaccaaagcccattcggcattaaccattatgccataaatgaatctctggtacaaggtctccttgacgttatggaccttaagaacaatacttggcgtactgttcctctgtcccatgacacactaggccgcccaatgtggcttctagattggcgtcaaaatcaagcttacgcctggtttccacaagaaaaccacttctctaaagaagatctaatcgccgcccatattcttggaatcccctgttctccaagactaggccctcgcgacgttgatgattggcaattctttccaggaaatgtcatgccacaacatatcaatatcgccgcttatgaaagagcaattcctcgacgattcttcggagcagcagagtatcggacgatttccactcgcatgtgggaacttcccttcctatcagctgtcgccggacagatgtcaggagcaaagcgcccagctccagaaagctcggccaccggaagcggatacatggaatcacctccagccgttgaaggtcaacagacagcagcaattatggatcctggaataatgcaaacgcgttattgtcagtatcaaatcatcgattggtgttatcatggaagagtaatcctcaacctgaacgctcagaagcaaaatcaagctctccgctcaattttgttctctccaaattga

SEQ ID NO: 673 - DNA, 2022 bp, White clover cryptic virus 2
  source 1..2022: mol_type = other DNA
atgtctcctgatgagaaccccactctcaacaagacccctaagaaccaaactgttgaactcgtttttcaagataccaaagttcccgttccctctgataacttcatggaatcaatccgctctaacgctgctgctcacactgacactgctaatcagtggatcattgatgttttcccaaacatgactccaatacttctgtacgttatgcattatactcacttatatgctcaagctactgaatatcgcattcatgccaaatcatctgtttacactttgtgtatgtatttcatgactattgtctatggatacttcttgctgaatgatatctacacccgccctgcgcggtctgttcatgcccgtatttggattgaatcttcctggagatctgaatttgtcaaatttctgacgactcttcccgtcccagatattcttaaacccattctgtctcagttccatcctttcactactgctagaactaaaaatgtgttcttttgcccctctgctgctggatttgatcatgaccaattttttggccgtacttatcctatgaatatgttcgctgctattcacgactgcactgctacacttcctggtaactctaccagaactgatgtttttcgtgatttgtactcaagaattctgtattctataactactcctgcttatacttgcgttattcctgacttgattggtgctacccccgatcaaacaacccgaacaacgataaactttatgaactcaaggctctaccaaacctttaactctctgtttaatcctgttcttttccgcgactcccagcgccgtgctgctcttgctgccctctcatttactgctcctacttacccgactaaccatatcaatgcatatgattacctgttctctgcaaccgccccaaatcttagagaactaaagattgttatacaatctgtgattgcatgctccaaaggtgtttttgatgtttccggaacactcggatcttatgtttctgattattcctcttcctcaattgtccatcatggttactctacgtatccactccctgtctggtctcataccgatgatgccaccaaaccgcaaaccttcactgctgccacaattttccaactggtcactgaagatgccagagctcaagatatctgcttcctccaacgccctgctgctgagattgcccacactcgtcgtatcactgatttgacttatgcttcaactgctactcccactgttccagctacaatgcctgcaaatcatggtatatttcgaatttggccctactgtctccgctgtgacaatgatgccgaaaatggcttccctcgtcacgacaatgaagatctcgtcgcttactctgatgagattcacactgctccaagcgttcttgtcctcgatacccctggtgatactgttattagtgcccatatgcctaccgttgtcggtaaggtaattgagtcttttgaactcgatggctctacaatcgcaatgcctgatgctagaaaatcacttgccatgcaaaactgcatgtttgctgactctgccattgcttacaagtatgttcgtcctggatcctactggcgccctcgtgctgctggttccatcctgccacctcttaatcgagccctccctactgctcgcccccgtttaccagcttcctccttgcttcatgacagaactaaggttttcctacctcagttgaatgctcatgttaacgctattcctgaaaataatctgcttcctggatttactcagttgactcctgttaatgtcattcgctatgtccagcccttcttcggttttcacactgttgatcgtactgctaatgatgctgctcttgatgctgttcccggtatggctgaaggccatttgatgatctggtccccatacacttacaatccgtatgagtctgatgattatcctcccgtcgcccttgatgcgtctagacactactacctgactaatctgcgtaccatttttggtactgactacaatcttgttagtgtcaaacacatctatgaatcctaccccgctgtctaa

SEQ ID NO: 674 - DNA, 2022 bp, Red clover cryptic virus 2
  source 1..2022: mol_type = other DNA
atgtctactgaagagacccttcctcctactaagactattaagaaccaaaatgttaacctcattttccaagacaccaaagttcctatcccttctgataactttatggaattgctccgctctaatgctgctgctcacactgatacctcaaatctatgggttattgatgtactccctaactttaccccaattctgatgtttattatgcattacgctcatatccatgctcaagctgccgattatcgcgttcatgctaagtcatctgcttacactttgtgtatgtactatatgactgtcgtctatggctacttcttgctcaatgatctacacactcgtcctacccggtctgttcatgcccgtgtttgggttgaatcatcctggagatctgattttgttaagttcctgactacccttcctgtccctgaatttctcaagccaatcttgtcccaatttcatccatttaacacagacagaactaaaaatgtgttctttagcccctctgctgctggatttgatcatgaccaattctttggccgtatctttcctatgaatatgtttgctgcattccacgattgtactgctacactccctggtaactcctccaaagttgatgtccttcgtaatttatacacccgtaatctatacaccataactgctcctggttatacttgtatgattcctgatttgattggaattactcccgatcaagccgctgccactactgttaactatatgaattctaagttttatcaaactttcacttctatctttaatcctgtccttttccgcgactcccagcgtcgagcttcacttgctgctctctcattcactgctcccacttatccgactaaccatatcaatgcttatgattacatgttctccgctacagcccctaacctacgcgaacttcgaattgtgttacaatcaatcattgctattaccaaagatgttttcaaatctgatcaaacgcttggtaattatgttgctgattactcctccggctccataatccatcatggttactccacttatgctcttccaacttggtcacatactcctactactggaaaatttgaccgatttaatactgctaacaccttcaatttagttactgaagatgctagagctgaagatatctgtttccttcaacgccctgctgctgagatccctcatacccgcctcatcactgacatagtttatgctgctactactgctcctgctacttccttgactgtacctgctaaccatgctctctaccgccgttggccttactgcctccgccttgatgaagatgctgctaatggcttccctcgccatgataatgaagatcttgttgctttctctgctgaaagccatgctgctccacgcgttcttgtcctcgatactcctggtgataccgtgactagtgcccaccttcctactcttacaggtaaggtaattgagtcttttgaactcgatggctctactattgaaatgcccgatgctagaaagtcccttggcatgcaaaactgcatgtttgccgactctgccatcgcttacaaatatgtccgtcccggatcttactggcgccctcgtgctgctggtggaactctcccaccgttgaatcgtgcccctccaaactctcgtcctcgtttgccagcctcctcactgctacatgatagaactaaagtttttcttccccagttaaaccgacacgttaatgccgttcctgataatgatgcccttcctggtttcactcagattactcctgttaatgtcattcgctatatccagtcttttcttggatttcgcactgttgatagttctgccaatgaagctgcccttgatgctgtccctggaatgaatgaaagcttgctgatgatctggtccccatatacctacaacccatatgagtctgatgattatcctgctcttgcttatgatgcctctaggcattattacttgaccaacctccgtaccatctttggtactgattacaatttggttgccaccaagcacatttatgagtccttccccgctgtttaa

SEQ ID NO: 675 - DNA, 2022 bp, Hop trefoil cryptic virus 2
  source 1..2022: mol_type = other DNA
atgtctactgaagaaactgctcctcagactaaggcaatcaagaaccaaaatgttgtcctctcctttgaagatggaaaaccacctggtcccgtctctgacttcatgtctttgttccgctcaaactcttgtgcacacactgatactgctaatcaatggatcattgatgttttccctaacatgactcccattctcatgtacgtcatgaccaaagcccaacaccattctgaagctactgactatcgtctccactccaagtcatctgtcttcaccatctgtatgtactacatgtccatcatttatggctacttcttgttgaatgatttacattcccgccccactcaatctgcccatgctcgcaactgggttgagaactcttggaaatcctcctttgctaagttccttatgacacttcccgtgcctgaatttctgcttcccatccttgctcagttccacccattcaataccgacaggactaagaatgttttctttagtccctccgctgctggatttgaccatgaccaattctttggccgtgtctatcctttgaacatgtttgctgtaatccatgactgcactgctaccctccctggtaattctaccagaacccaagtcctacaagaccttttctcaaaggtcctatacactgttaacgcccctggtttcacttgtctgattcctgatctatttggtcttaccctcgatcaaacagttaacaccactgttaattacatgaattccagactttaccaagtcttttcatcactgtttaatcccgtgttattccgcgactctcagcgccgctcatcccttgctgcactctctttcaccccgcctacatatacaaccaatcatattaatgcatatgactacatgtttgctgcctatcctgcaaatctccgtgaattgcaagttgtcctccaatccgtctctgccattattaaagatgttgctgaatgtaagatacccctcggtacctatgttgctgattattcttctccatccattatccaccatggatactcctcctatgctctcccaacttggtcccattctgagaccgaacaaaaagttgaccgatttgaaaatgctaccactttcaatctcgtcactgaagatgcaagagcccaagatatctgttttctccaacgccccactcaagctatcccacatgaacacaatgtgactgatctcatattcaccgctgctggcgctcctgataccgacattcccctgcctgctaatcatgcaatcgttcgtcgatttccgttctgcctccgccttgatgcccctgctgaaaatggcttccctcgccatgacaatgaagatttagttaagttttctgatgatacccacagtgcccctggcgttctagtcctcgataccatcggtgatggtgtactctctgctcacctcccgactctcactggaaaaataatcgagtcatttgaactcgatggttccacaatcgaaatgcctgatgtaaggaaatcactcggcatgcaaaactgcatgttcgctgactctgccgtcgcatataaatatgtgcgccctggctcctactggcaccctcgcgccgctggatctactcttcctccactgaatcgagctccacccaattctcgtccccgtctcccggcttcgtctctgctccatgatagaaccaaagttatgctgcctcaactcaatgttcggattaatgctgctctcaatgacaatgctctccctggtcttacccgtgttacgcctgtcaatgttgtccgctacacccaatctttccttggattccgcacagttgatagttccaataatgctgcaaacctcgatgctgtccccgggatgactgaaggtcttctgatgctctggtctccctacacatacactccgtatgagtctggtgattatccattcgctgatctcagtgcttctaggcactattatctgaccaacctccgtaccatctttggtactgactacaacttggtttcagttaagcatccctatgaagctttccctgtcgtttaa

SEQ ID NO: 676 - DNA, 2022 bp, Dill cryptic virus 2
  source 1..2022: mol_type = other DNA
atgtcttctacatccctcacatcccgtctcaatgccctcaagactaagacaatgaacctcacctttactgatgtcaaagcccctgtaccctctgctgatatccttgaactcttccgtgccaacactggtgctagagccgattcctgcaatgactggacaatcgatgttttcccaaacatgactccaatcatgatgtacactatgctgatgtccattcgacatgccaatgctactcaacagcgcgaacattccaaagcttccgttgctactatctgcatgcatcacatggccgttatctatggcttcttcctcgtcaatgaccttcatgtccgtcctgctccgtctgctcacgcccgctcttgggctgaaacctcctggaaagatgactttgtcaattttcttatgaacgtccctgttcccgagtttctgactaccattctctcccagttccatgcctttgaaactgacagaacaaagaatgttttctttgttccatctgctgctggttatgatcacgaccaattctttggacgtgtttaccctctgaatatgtttgcaacaatccatgactgcactgctaacctacctggcaactcctcaaaaattgatgttctcaaagacctttactcaaaagttctttattccattcaagtgcccaactttacctgctgtattcccgatcttatcggtgttacaattagtcaagtgactaacactactgccaaccatctgaattcaaaactcttccaagtgtttaattcattgataaaccctgtgctgttccgcgacttccaacgccgctccactcttgctgctctctcattcaagtccccaacataccaaactgatgatatcaacgcctatgacctgctcttctctgcaactcctgcgaatctacgcgagttgaaagttgttatgcaagctgtctctgccgtgctagctgattctgtcccgtgtaaatctacacttggacgttttattgccgaaaactcatcaagtgccataatcaaacatggctactcaacgtatgctctaccaacctggtcacacaacgagaactctaataagtcctcgctatttgctgctgttaccacacacaatctcgtatctgaagaanaacgagctgaagacttctgtttcctacaacgcccgtctcaagaaattcctcatactcatgagctgaatgatctgcgatacgtcgccgatactgacaaaagtactgctgttgcgctccctgccaatcatagtattattcgtacttttcctctctgcctccgctacaattccagtcagaaggatggctttcctcgccacaacaataatgatctcatcaagttccaagatgaaatccatacttacccaagcgttttagtgctcgatactgatggtgaccttactgtcactgctcatctgcccctacttgctggaaagattattgaatctttcgaaattgatggtacaacaattgaaatgcccaacactttcaagtctctaggcatgcaaaactgcatgtttgctgattctgccatcccttacaagtatgtcctgcccggatcctactatcatcctcgcactactggcactgttctccctcccttgaaccgagctcccccgaactccaagcctcgtctgcccgcatctaccttgctccatgaccgcctcaaaatcatgctccctcgatttaatgtcgcaattgctgaacaaaacattggaaatacccttccaggtatgactccaattgctcctgtcaatgtgctccgttacattcagtcctttttaggatttagaactgttgatgcctcctccaatgctgctactcttgatgctgtcccgtcgatgcccactgatcgcctaatggtttggtctccctacacatacaccccatatgaacctgatgactatcccattcctgatcttggcgcttcaaggcactactatttgaccaatcttcgtaccattttcggtactgactacaaccttgttcaaaccaagcacccttatgaagctctccccgtcgtgtaa

SEQ ID NO: 677 - DNA, 1473 bp, unidentified
  source 1..1473: mol_type = other DNA
atggaccccaacgtccctattgctcaacccaatggccccgctatcccaaacgttgccgctgccgctgctaaccctcctccaccgattcaaccggcccctcccgccccaggtgctgtccaacaagcccctgcccctgctccccgccgcaatcgcttaccccacggtcctgtgcccacatcttcccgcaccgccgtaacctccgctcctgctttgctcgagctcgctgccgcaactcctatgtacacggaacaacgccgtgctacaaacttctttgtccctgactctcagatgctcttccatgtgctgagtatttgtgaccaaatgatgaactctactgaacgatttcttcgttcttctcctgcctggatgcccattgtctcacagctctacatttcagttctctggaatgtcatgattctcaatgtttttgtcaactctggctatggctccgccttttcttcgttcctatctgaactttatggcgtcctccggatcgacgaatgcatgatccccggaccactcgtccccttcttccaagctttggccgccgtcaatggcccctttgactggattggagacatcgtccccggtctccccaacttctctgcgctttggaatgaagctggtttctatgccaacagcaattatgctaggcaagtacccatccccgcccttatcttggaccaactccactacttctcacagtatgccatccctgctaaccagcagtcaacttacgctactttcgaatggtacaggaacgttttccaacaaggcctcggtgccatgaaccgcctcaatcgaattggcccacaactttgtggctccctattcaccacccaagctgagtacgatgccgcccgcaacttctggaatgctagtctgaacactggtatcaccagagctaatgccgcagaaggccaacccgccttcaacaactatcgccaactttttggttttgaatcccaattaggcgccctccaactgaactggttcactagtgtctctatcgctatgaacaagtatactcagttcttcaacggctccgtccctctcaaatccatcctcccaaccggaattggcgctgttgtcatcgctggctcacctgtcaacaatcctagtactcgtacttggatttaccctcctgacacctcaatcgagccatttacaactacacgctacccaccacgccgtgaaatacccgacgctatggccatacaatttgctcattcagaccatgaattagaagagcaagctgaacaatatgccatgctcacccacaccaacatcaaatggcatgcgaacctcaccgcccagaacaactggactgccatcactgctgacgggctctatcttggtgattattggaacatgatgccttacaggttttttgctccacttcactacaaggcccaatttgcccaaatcatcgcctctcgctaccaccaacaggccgcgaaccgcgccgaatag

SEQ ID NO: 678 - DNA, 1464 bp, unidentified
  source 1..1464: mol_type = other DNA
atgaatcacaacactcctcctgctgacgccaatggccctgcccttcctgaaggctccgtccctccccctaaccctcctactcacatccctgtagcccctgctgctcctggcgccgtccaaacgccgcctgctccccctgcccgtcgcaatcgccaaccccatggccctgtgcccgctgccagcaaccaccatgctcctggagctcctgctctcctcgaactctccgctgcctacccgatgtatactgaacaacgtcgtggtgttaacttctttgtccctgactcccaaatgctctttcacgttttgggtatgtgtgaccaaatgatgaactctactgaccgatttcttaggtcctcccctgcttggctccctatcgtctcccagctttacatagctgttctctggaatgttatgatctgccgtgtttacataaacactggctatgctagccatctagctcccatcatcgatgttctcatctctcatctgcaaatccatgaatgcatgatccctggacctttagttcctttctttcaatcccttgctgccgtaaatggcccttttgactggataggtgacattactcctgccatgcctgcttttgcaagtctctggaatgctgaacaatttaccgctcgagatagttatgctcgtcaaatccccatacctgccattattctcgatcaacttcaccactttgccacccgtgctattgtagccggagttgccaattatggtacttttgaatggtatagaagcattttcaaccgtggtgttggtgcaacccccgccaactcaagacttggaccacaactttgtggctcccttttcaccactaatgctcaattcgatgccgctcgtgctttttggaactctgcccttgcttctggtattacccgtactgatgccgctcgtcccccgctcgtcaattacgctcagttgcttggcttccaagcccaagatggttcagaccaactcaattggtttcagtttacttcttcagtgatgcaaacttactgccaatacttcaatggttctgtgcctctcaaatctatctccctcactggtataggtgctgtcgttacctacggaatccccgttaacaacgtagccacccgaaactggttttatcctactgctgctatgatcgaacctttcgccacatcccgctatgctccccgccgtgaaataccaaatcaacttgctgtcaaatttcaacatgctgaccacgaggtcgaagaacaagccgaacaatatgcgattctcacccacactaacattaagtggtacgaatcgcttatcacccagaatgcgttaactgccgtcaccggtaacctcgtccaccaaggcgactactggcgtatgatgccgttccgctattctagtcccatcagccttaaggtgcaatatgctcaaattattgcctctcgctaccaccagcttgctgccaaccgtgctgaatag

SEQ ID NO: 679 - DNA, 1185 bp, unidentified
  source 1..1185: mol_type = other DNA
atgacaactggtgatcgtgtaacacctactgacggcattacaaccgtcgatgcacccacagcaactctcgaggctaagcttgactcttcgtctaccgcttacctcaaaagcgcgaccgactttctcactcagagtagtcggattggtaccttgaggaccagctacaaggaccgccgtagatacgtctacttaaagtcccaagctatgtttgactcccttgtcgagttatactctcttctctttaccacccagtggcaagttttccgcaggtttactgatattttcgttcctcctgccaacgttactgccacccgctacctagccatgaactacatctctatgtggattcaggatacgtatgcgatgaaccgcgctgccctcatgaaattatcggtggtagctttaaatgatcgctttcctgttgagatacccattgttggttatcaatacgacgcgtacctcgctcacctgagcgccgctctccgcccaaccctcaccaaacacatgatggaagacactctctggatcccctgcttcacaaggtcgcccaacttccaagttgaaagccccttcgggattaccggttacgtcatcaacgacgtcatctttaccggagcgatgaacatcatgaaagaacgcaagctttggaggatcattgatctcccaaccaacgttctcggccgtcccagctggcttttcgactggcatgacgatgatcgagtctgtgcttggttcccaatggaagggaatttcacaatggatgatgtcactatggcatatatccttggagtcgcctgtactcctaaactcgccccatgcgatgttgatgattggcaatactttcccaacgatgtggtcccagccaacttggacccctatgcctttctccgtctgacaaacagacgtttccatggaggttacgagattcgcaccctcgacgcagctaacatgcccggccagaccggaacaacaactgacagtcgtaagcgcccacgtcccggcgagtcaacctcagcccctgctctcccgcagacatcggagccgcaaacgcaaatgcaagtcgacactcccccagctcccaagccaagattccgtctcgtagactggacctaccactacttggtcgttctcaacaaggaggatcacactcgcttcgctgccctcaaaagcatctgctggaactga

SEQ ID NO: 680 - DNA, 1464 bp, unidentified
  source 1..1464: mol_type = other DNA
atgtcgatgaaaagaaagtcaaggcctagttcttcaacaaaagatttagaggtagaagacacctatctcaaacaatctggacttgattcaatgaataagctcgaaccagtcgagcaatcaaaagacgaagagactaccaaagtctccatgctccccaccgcttctactgctataatcgccccgcgtaaactaactgcggaagattttagctctaaacgtaagccggatcaaacgtccgctgttagcccattctttgggttccttaggacccacatcctacaccctacacagggcaggctctcacactactacccttcctgccacatgatggactacattcttcactctatcaattcaactctctgtgataattactacttcaagagagaaactccaaactaccacccttacattctccgactctacttcggagttcttttctgggttcagtgcttgcgcgctggaaatgatgttcaggtcattaatgacctacactacgatttcttgcagcgtttcctagactgcaatcctctcgagtctttggccattccaggcccacttctcggactcttcaagacactctgctcctcccagccagagttcccacattatgggaaagtttacccccgcattcctgcgagcccaggaccaagacgccgagacatgttctcaaagaacgtcccaagcgcccaattcttacccaacgttcctggtattttcgcactcatccaccatctccacggactttctgagggtgaacacccgatttacccgaaaagaaaaagacacattcctgtcactgaggaggccagtaacttcggtttcaaggccttcgccgcttttccaaacagaatccagcgcgatcgttggatggttagctcccccggcctccagtatccctgtgaagccgacatgaagatgaatgaagcgttcgctgaacgtttctatgattttgactttcctgcctttaacgcagatgacaatctctccaccatcaccaacttcctccacatgaggaaaagtatggcttggttcatccgggccaaggaagtcgcctgctcggccgctagattcttttcagactctggcactctcgccgactgttctccacacggtctggtctcaaaccagatcattgttgcgattactcctccacctgaggagacttttgctgatccccgcttctccgccgatccaagagccctctatcccttcagtttcaagctgaagagcaccgcccacaacctccccccacttgcggaagctgccgcagccttctcccagacgcacatccggatttttccggaatacccgttggccggaaactttggtcaaaagaccgacgaatcaggccccttttgggacatcaggcccattggctccagccccaccgacgacacctcctacctcaccatcccacccatggtcaaggcagcactcatcgagaaaggctccagccgttag

SEQ ID NO: 681 - DNA, 2019 bp, Cannabis cryptic virus
  source 1..2019: mol_type = other DNA
atgtcttcctcaaccatcacttcccgtctcgatgccctcaaaagcaagaacgtgataattgaattcaaagaagcgaaaactcctgtcccctctgctgacattttgcaactctttgctgacaacaccgccgcccgctctgactcatccaatgaatggattattgatgttttcccaaacttcactcccatcctgatgtacattatgctcaatgcgattcgccacgcgaacgccactgctcaacgtgaacattccaagtcatctgttgccaccatttgcatgtatcatctgtccattgtctatggatttttcctcatcaatgacctcaatgtccgtcctgctccgtctgctcatgcccgtatctgggccgaatccaactggagatctgaatttgtgaaatttctgtccaccctgcctgtacctgagttccttattcccatcctatcccagtttcacgcctttgaaaccgcaagaacaaagaatgttttctttattccctctgccgccggctatgaccacgaccaattcttcggacgtgtttatcctttgaatatgttcgccgcaattcatgactgtactgccacactgcccggaaactcctccaaaatcgatgtccttagagacctctactccagagtactctactcaattactgacccagcctacacctgcgtcattcccgatcttattggaatcacccttagcgctgctgacattacccaagctcaatacatgaattcaaaactttaccaagttttctcttctgttattaatcctgtcctgttccgcgactttcagcgccgatcctccctcgccgctctatcattcaaagctccaacgtttgcctctgctaacgttaacgcttatgatctgatgttttcagccacttccgctaatctgcgtgaattaaaggttgtcctacaatcagtccatgccgttatctctgatgatgtatcatgtaagaccagccttggtcaatttattgctgatgctaccacctcaacaatcattaaacatggatactccacatacgctcttcccacctggtcccacagtgaagtcaccaacaaagctcaaacctttcgtgccattactgcccaacaactaatctctgaagatgcccgtgcccaagacttctgtttccttcaacgccctgcagctgaaattcctcacacccacaacctcgaagacgtacgttacgtacgcaccgatgcccccactgaaccagtcgctctgccccagaatcacagtatcatccgtaacttccctctctgcctcagaaacaatgcgaatgccgccgtctttccccgcgtagacaacaacacactgatcaattttagtgaagaaatccacactgttccaagcgtcttagtgctcgacaccgatggtgatcaaaccatcactgcccacctgccactacttgccggaaagatcattgaatcttttgaactcgatggaaccactatcgaaatgcccaatgccatgaaatcactcggcatgcaaaactgcatgttcgctgactctgccattccgtacaagtatgttcgccctggctccgcttaccatcccgttaatgctggaaccatactgccgccccgttctcgagctactcccaattccactcctcgcctgcctgcctcgtcgttcctatacaatcgactgcgtgttaatctcccccgattcaacctcgctatcaatgaagaacgcattggcaacattctcccaggaatgactctacttgatggagtcactgtcctccggtatgttcagtcctttctaggattcaacaccgtcagccgtgctgacaatgccgataatggagacaatgtcccggcgatgccccggaacctgcttctggtctggtccccgtacacgtacactccgtatgaatctgatgacctgcctgaaccagcacttggcgaatcaaggcactactacttgacaaacctccgtaccatcttcggaacggactacaaccttgttcaagccaagcatccctatgaatcgctccccgtcgtttaa

SEQ ID NO: 682 - DNA, 1467 bp, unidentified
  source 1..1467: mol_type = other DNA
atgaatcctgaaacaccacttgccgaccccaacggtcccaccccacctcacggtgctgctgcccaacccacccctggccaacacatccctgctggaactccctccactggtgctgtccacttgacaccagccccgcaacccaagcgcaaccgcgcgccccgtggcccgttcgacaatgcctcgagcacctctgctcctggagctcctgctttactggagcttgctgctgcctaccccatgtccacggaacaaaggcgttccccaaacaccttcgtccctgacgcccagatgcttttccatgtcctcagcttatgcgacaacatgatgctgtctaccgaccgtttcacccgctctgctcccgcctggctccccatcgtctcgcagctttacatttccatcctttggttcaccatgattctcaaagtgtatgtcaactcctcctatggagccatgcacgctcacctcctgaatatcttagtcgcccatcttcgtatagatgagtgccttattcctggacctctcgtcccattcttccaatctcttggagccattaacggcccttttgaatggatcggagacatagtgccgatcatccccgaattttctcagctttggaacaccacatcgttctaccccactgactcattcgctcgcatcttccccatccctgctatcctcctcgatcaactgcactactttgcctccatcacagtcaccgaacaagaaaccattttcggtcactttgaatggtacagaaacattttctctctcggccaaggcaccttcaacccccgccttcgcctaggcccgcaactctgtggctccctctatgccaccgaatctcaggtcaccaacgctcgcactttttggagcgctgccctccgcaccgggataacccgcaccaatgccgcagctaatcaacctctttttagctcctaccctcaactccttggtttcgtcgaccagaacgacgctatgcagctggactggttccagcacacagccatagtcatgcagaagtactgtcagtacttcaatggctccgttcccctcaaatcaatcagccccactggcatcggcgctgtcgccgttcacggctaccccaactacagcggtgctgctcgcacctggatgtaccctgctaccaacaccctctcctcattcaagtctagccgcttctccgccctcagagaaatccctgctctcctcaccgttaggttcgagcatgctgatcacgagcttgaagaacaagccgaacagtatgccattgccacacatactaacatgtgctggtctaagaaccttacaacccagaacaactggactcaagtagctgaagccaatgtgcactcaggcacttactggtctatgacccctcatcgggcacacgcctctgtaaggctgaagacacaatacgcccagctcgtggcctcccgttatcaccaacaggctgccaaccgtgtctaa

SEQ ID NO: 683 - DNA, 1293 bp, Pepper cryptic virus 2
  source 1..1293: mol_type = other DNA
atggcgacaccagttagtgacacaccaactactaagtctacacaagacaagactgaccaattaccggcagctacgccccctataacgcaaaagccaccctcctacaaatccgagatttcaagaatcgccgactacctcgccgatgactacgaaattggatacgtaagagaccgtccacccaagcatagaagatatgctgtgttaaggacgcaagctttattcaacaaacttatcgaaatctacggtaagttatttaaacagaactgggaattcctccgacgttcaatcgacggtttcacaaccgcagttggcattcgtgagagacaatgggaaaacgcagcccacgcgtatatctcatgctggttctttgacctttacgtttctgtcagaaacgctgttgaaaaggtctcaggtactgcatttacacagtactatcatgcacacgcagctcacattttgcatgaatatgatgcacttcttgttcacttgaatgctatcattcgccccactcatatcaaactcgcactcgaagattgtatatacataccgaggattgcaacaaatatgaatatcaccaaccctaaccccttcggcctcacagaagctacatgggatagagatgctgactttgcttattcgatcatggatcgtatgaaagcaccgggctccagatggagagttgagcccctagttaccgacactctcggcagaccaggatggttactcgactggcaccaggtaggcgcacaacaacaagcatatgcttggtttccttcagaaggcaactactctatggaggatttgattgcaccacacataattggagaggcacttactccacttatgggcccttgcgacattgatgattggcaatactttccaaatttcatccgtccagctaacgtaccatggcagaacatggaacgcgtatctgcacgccgcttccgcggaagcgctgaagttcgaacctatgctgaagagaaagtaaaccttactcgtttcacatctacaggtcacgaaacttcgaagaaaagaagtaagccgtcctcaaccaccacgacctcaagtcaaggcggatccagggacatggaaacagaagatgaacctcgtgaagtcgtaactgatatcacattatcacaggttacatccactcaacaactacaaactctaatgactacaggagaagcagataggtttaggattatcgactacacttattattgctgtgttattcttaggaataccgctcagaaaagagacggagcaattagaagtttctgttttaagcagtga

SEQ ID NO: 684 - DNA, 1236 bp, unidentified
  source 1..1236: mol_type = other DNA
atggcagaaaacgatattccagccgaaggaatcccagcaagacctccgcctgccgctaaccccttcacgggattaaaccgtgatgaactcgaccgcatcgtcgagcaaccagaagaggataaccaaattggtttattccgagataaggctagatcttatcgaagatacgtagacttacgtacctctccgcttagtacaaggttaatcaacttgtactcaaaccttttcaccactcactggaacgtgttcaagcacaccatgtctggagaagcccccgccggattcgcctcaaaagcgatctacctggcaacgatctacgtatccgcatggatatgggatcttcatgtctccatcagagaatctgtgagaaggatctctggtactgctttcaaccagctgtttcagcaagatgcttaccatcaggctgaccgctatgacccatttctgcagcacctcaacaccatcattcgccctacaccaatccatcaggcactggaagacacactctacataccagtcgtctcacgaaacatagattgggccaacgccaacaataacgtgttcggattaccaagtcatgcatatgacgacaacatcctgaacgccatcttagacgttatggacgaccgtcgtaatcaatggtcaacaattcccatctctactaatgtattaggtagacctggctggctattagactacagactgggacaagcatacgcttggttcccgatggaagccaactactctcaagtggaccttatagctccacacatccttggaactccctgcaccccaaggcttggaccgagagataaagatgactggcaagttttcagatacaacgccgcaccaccacccggagtcagactgaacccgcacgactttagaagagcaaccgaacgcagcttctatggttccgccgagtacaggacgatcgagcacgctgtgcacgtatttgactggcaagccaccatcccacctcctgacgcagcgacttcagcagcctcgcaaccaggaaagagaaaacaaggcgattcatccacatcagcaatggcgctaatggaaacagacaaggacccaccgcagcccttcgttccaccaccgcctgtggacctgaacagataccgtctcatagactggtgctaccacgcacgcgtcatcgacggcgaagatcagcagactcgcaaccgcgcactaaggaacttcatattccaagcaggccaccaacctacttag

SEQ ID NO: 685 - DNA, 1239 bp, Pepper cryptic virus 1
  source 1..1239: mol_type = other DNA
atgggcgatcgtgttaacgctcaagacgacgatacagtcgtccctcaccaagcacctcttcaaccagcagctcttcagcaagacctcaccagatctgccgactacttattagacaacgtccgtattggcaaccaccgacaacgctatgataaataccgtcgctatgtccttctcagatccagcgaaatattcactagtctcgtcgccatttacgctcacatcttttctagttattggcaacactttcggaggttcactgatcaatttcaagctccaactggagtccaactccccacttttgtggcacgagtctacatctccacttggcttcatgatctatactgctctattcgagaggccactagaagtatttctccattagcctttaatgagaggtactcatatgaattgctcccatactccaccgagtacgacccctttctcgcatttctgtctatgtctattaaaccaacacatattcagcatactcccgagaacacattatggattcctatcctttgtgaaaattacgactgggatcgaaacgaagcaaatcacaacccttttggcattactaatttcacattgaatagtaacctattctatgggcttttagcgatactgaaagaacggaaggagtttaagttatcaactctgactactaatacaataggccgaccctgttggctctttgattggcacgacaacgtgcaagtctgcgcatggtttccccgtgaagcaaacttcaacagtcaagatgtaaccgccgcttacatcattggagtagcctgtactcccaaactaggacccagcgatgacgacgcatggaaatactatgcatccctcaactctgtaccaactttcacaccaactgagccgcgtctcaccaatcgtcggtcatacggtgcttatgaagtccgcactcgtgaaactgaaaataactatttcttaccagatagtcttctcaacatcatcgaggattttaccgcaacaggtacaacacaacgaaggaagatccgtcgcccttcagctacgtccgcgtctaccggagccgctatcattatcagagatacgcccggaacagcgtccactgcaaccacgtccactacggagaccgaagttaccttccctccagtcatcaggactaagattagagactggtactaccactctcgtgtaattctagaacttgaagacaattctaggacagcagctttaagaatgtttatcattgcttaa

SEQ ID NO: 686 - DNA, 1473 bp, Carrot cryptic virus
  source 1..1473: mol_type = other DNA
atggatgacaatactcctgctgcccaacccaatggcccccacgctcctgctgccgctgccccccacgctgttccccctcctgcaatccctcctgctactcctgcccctggtgctgtccaacaaccacctgctccggctccccgtcgcagtcgcaaccctcatggccccactcccatctctagccgcgtatctgctccttctgcccctgctctcctagaactccctgctgccacccccatgtacaccgaacaacgccgctccgccaacttcttcgtccctgacgcccaaatgcttttccatgtgttaagcatatgtgatcagatgatgaactctactgagcgctttctccgctcttctcctgcctggatgccaattgtctctcagctttacatttcagttctctggaatgtcatgaccatccacgtctttgtcaactctggatatggctctgctttcagttccttcctcacggaactgtacagtgtccttcggattgatgaatgtatgatccctggacctcttgtccctttcttccaagctctaggtgccgttaatggcccttttgactggattggagacatagtccccggactccccaacttctctgcgctttggaatgaagctggctttcacgccaacaacaattatgtccgtcaggttcccatccctgccgtcattcttgaccagcttcactacttttctcagtatgctgtccccgccaaccaacagtctacctacaccacttttcagtggtacagaaatgtgttccaacaaggccttggagccatgaaccgtctcaatcggatcggcccccagctttgtgggtctctcttcaccacccaagcacaatatgacgccgctcgcaacttctggaatgccagtctcaacgctggtattactagagccaatgctaacgaaggccaacctgccttctccaactatcgccaactttttggctttgaatctcagactggtgttctccaagtcaactggttcactagcgtatctatcgctatgaacaagtacacccagtttttcaatggctctgtccccctcaagtccatcctcccaaccgggataggtgctgtcgttatctacggcacaccgatgaacaatcctagtacccgtacttgggtctatccacccgacaccggtattgaaccgttcaccaccacccgctatccgccgcgtcgcgaaatccctgacgccctgtcaattcaattttctcatgctgaccatgagcttgaagaacaggccgaacagtatgctatgctcacccataccaacatcaaatggtaccagaacctggaaacccagaacaactggactgccattgctgctggagggctttaccttggagactactggaacatgatgccttataggttctctgctcctcttcactacaagtctcagtatgcccagatcatcgcctctcgctaccaccaacaagctgccaacaaagccgaatag

SEQ ID NO: 687 - DNA, 2025 bp, Crimson clover cryptic virus 2
  source 1..2025: mol_type = other DNA
atgactaccaactcatcaaacgcccgactcaataagctgaagaataacactgttcctcttcctttcaatgctactgaagtccctgaacccgctactgacctcctcacttctatgaaggagaatacttctgctcactctgctactgctaatcaatggaccatcgatctctttcccaacatgattcctgtcctaatccacgttatgtctgctgcctcacaccatgctaacgcgattaactttcgtgaacactcgaagacctctgctgctactgttgccatgtaccatatggccgtcgtttatggatacttccttttgaatgatctgaacattcgtctcaatccttccgctcacgcccgatcctgggctgaagcctcatggaaatctgaatttgttgaattcctctacggtttgcccgttcctgaattccttgccccaattttatctgaataccagcattttgtcactgacaaaacaccaaatgtccactttacaccatctgctgctggatttgaccatgaccaattttttggacgcgttttccctctgaatatgtttgctgccctgcatgatagtactgctactctacctagtagttctacatatgctcaagtcttacaagacctatttagtagacctttgtacacaatcactgatcctgcctttacctgttacctccctgaccttcttggaataactctcactgctggagaaaatgttaccaccttgaattatattaattcaaaattgtaccaagttttcactactatattcaatcccgttttgttccgcgatcaccaacgtcgctcctcacttgctgcactttcattcaagtcccccacctaccctaatccaaatatcaatgcttatgatttactgttttctgcctctgtcgccaatctgcgcgaaattaagatagttctacagtctatttataaattgttcgatggaagagttgcttgtaaacacactttaagtcagtttatctgcgaatccacttccccgtcaattacaaagcacgggtactccaccttcccgctccctacttggagccacactgaatccgacgcgaaagcaatccgcttttccggcgtcactgcccttgttcatgtgtctgaagaagatagagcccaagatttttgctttttacaacgccctgctgaagctatccctcatgttaatgaagtccccgatatccgctatgccaccactgaagatcctgaaactgctgttcctctccctgcgaaccacatccttgttcgccgctttccattcgcaattcgtttgcgtcaagaagctgcaaatggctttcctcgccatgataatgatgatctcacaaaattttctgaccatgtgcatacagctccccgcgttttaattctcgatactactggtgacggaatcatttccgcccacaccaccactgcttctggcaaaataattgaatccttcgaactagatggatcaacaattgaaatgccaaatgctgacaagagcctaggtatgcaaaactgcctctttgctgattctgccattgcctataaatatgtccgtcctggatccttttaccgtccacgaacacaaggctccgtcctacctccactcaatcgagctccccctaattcaaggcctcgcctccctgcatcttccatgctccatgatcgtactaaggtatttttacctcagttgaacacccgtatcaatgaagctgttgacatccgcacccttcccggtctcactatgctgaataatgtcaattgtatcaactatgctcaatcctttattggatttaaaactgttgatgccactaggaatgatgacgtcctggatgctgtccctggaatgcccctgaataacctgattctctggtctccttatacctacactgcttatgaggatgaaacctatcctgatcccgttttcagtaattcccggcactactacttgaccaacctccgtaccatctttggtactgacaccaatttgatcaaggccgtccacccctatgaagcctaccccgtctcttaa

SEQ ID NO: 688 - DNA, 1281 bp, Beet cryptic virus 2
  source 1..1281: mol_type = other DNA
atgactggacccacacaggcccacctcatcgaagcgacaagtttcacgggactcaaccgtgacgagctcgacagcatcgtggacgccttacaagaggagaaccaaattggtacctttcgtgacaggccaaaagcctacaggcgatatgttcacgtacgctctcaggagctctttgatcggctaagcgaactctatgccgatttatttacaagtaattggtctgctttcaagcatgcctatattacagagccaactggccgtgaagatgcaaacagcatctcaacgaaagcctctttcatggctcaatgttatttgaccgcgtggttctgggacacgcaatactgcatacgcgaaagcgtaagaaagttgtcaggcactgcctacaaccagcatttcacagaggacctcaacctcatctcccctaagtatgatccattcttacaacacctgaacatggtcataagacccactctcatccaccaatccacagaagatacactctatatcccactgcttggacaaacgtttaactacaacgaggatgcttataactttctcaatctccaaggctgcggcaccgaaatccgccaagtttatgccataacagatgttatggacagcagacgcacagaatggtcaacaataccactcgccaccaacgtactgggacgagctagctggctactcgacttcaagcaaggcaacgcctatgcttggtttccgtttgaatccaactttactgagctagacttagtagcaccttacattcttggaataccctgcactccaagactgggaccccgagacgaagaccactaccagcactggacccacaatgatccccctctaagcacagatggcaatatcattttgaatccgctggcatatgtacgttcgtctgaacgcaaattctttggcaatgctgagtacagaacaatggaatataacagctacacacaaaactttgaagcttatatgccaagagttactacctcaacacaagcgaagaacaagcgcaagaaagatgctgcaccagagcagttatctaccggacaaggagatggatcatcatcatcgaaagatgctgagatgtctactgaagaatcagaagctccaccaccgccgaagattccaagaccaagacaaatccatcaattcagattgatcgactgggtttaccactcaagagtaatcctaggagctgacaaagctatgcaacgacgtgccctttgggacttcattcatgctggagcaactccaagtcatcaaccaaggccttag

SEQ ID NO: 689 - DNA, 1182 bp, Beet cryptic virus 2
  source 1..1182: mol_type = other DNA
atggcaccgaatgacgaacttgctgcaaaccttcaaggactcaaacgtcctgctcttgacgaaatagtgcattatcttgaggaccgtaatcaaatcggtatatctcacgataagaacttgtcctacaataggacgtgtgtactactcaccaatgagttacatgccaggctcgtgactctttacacgaacctcttcaccacttcatggcgacactttaaaagtgccgttcgtaaggaaatgccccgcactgaagccaatccacaacgctggctggccaactgctacataactgcatggttttgggatctccaagcctccatccaagaagccaccaagaccttgtctggtaagatttaccaagactacttccgagataacatccaccccatcttggaccgttatgatcctttcctccaacatctcaacaccattatcaagccaactcacattgttaatgcaactgaagatgtcctctacttccccatcatttcagccgactacagacgtgctgatgctgacatgaatatccatcgcattactggtgcattcacccgcccaaatgtggttatggatctagtttcactgatggacgacccaaactccggttggtccacagtacctttaaacacaaatgtgtttggccgcccaggctggctactagactatgacggaaccgatgcttatgcttggtttcctatggagaacaattacaatatgtgcgatctaatcgcccctcacattctcgctacgccctgcacagcgaaattaggcatatatgacgctgatatttggcaaaattgcccaggcaatataccaataacagcaacaacagctagaaccgctcgacgtgaatccgaacgccgtttctacggatctgcagaaaccagaacaattgagcagagaaactacactgtcaattttcctgagcttctaaagccaagagacaccggagcacgggctctagtcaccaccacccagagagcttcaacttctgggtctgttgaaccgacgacaggtgctcaaccagaacctgagacaccaacttttcagataacatttcgacaatttcgcattctcgattactgctatctagcgaaggtcatccacaagtctaattcccagatgatcaacaaggcactccgcaacttcatccagaagggagcctccaagaagaccgagtaa

SEQ ID NO: 690 - DNA, 1476 bp, unidentified
  source 1..1476: mol_type = other DNA
atggacaaatctaagaagtatctatctgatgctaaagaaatcatcaaggctaatggtcttgaagaaaaatttctcgccgctgctggtctttcatctatggatgaactcgaccctaagaacttcgctgagtttgaagctcctgctcctcctcaagttatgaagccctctatcgccgctgcccccatcattcaaaaaccgctttccaagcaggttgctgatgcctctactggctttaatccagagagcgcttctgatatgctcagaccatttattggtctaaagattaactacaaagctaggaagactgtatctacctatgctccgtcctctcttatgatggattatattctccatcaagttaacaatttacttgttgataatttctactttcgtcgggcttgccccgattaccacccttacatcttacgcctttactatggcgttttgttttggattcaatgcatgcgtgcaatgaatcatgctaggctgcttcacgctgaagcctcccaatgtctgtcaacattcttggatgccttccctgctgactcccttccaatttcaagtcctttacttgacttgttcaaaactctttgctgctcccaaccagagattcccacttttggagttgtatctcctactctcccattccatcctggccctgaagctaggagcgcttttatgctggctgatgctaccagccatgttttacccaacattcctgggattttcgctttgatcgagaacctccggacctgcctcaaccctggcgatgggcaacagcccaatctgcctgctaagggtaaacatatccccgttaccagtaccgccgctgcggcaactgttttcggtcaccaccaattcccaattttggccaacaggtcaaatgctgaaaaatggagcctttgctcctctggactacaatatccttgtgaagccgatcgtcgacttcacgaaaatttttctgaaaggctcgataacttcgagtttcctgtcactgccgaggatgatgacctcaggttttatagtgactttttgcacattactaatagtctagcttggtttgcccaagttagagatgttgctgccaatgaagctgctttcttcaatggctctggcactttggctgactgtccccctttcgggattgctgccaatcagattactgcgggctatttagccccaattattcaagttgctgctcctacccggagtgccgaccctgcctccctctttccattcgctattaagctcgaaaccgcatctcgagctcttcctgaattagctgaagcgatggctgcacttgcgcagaccaacgtgaatatctacccgacccatccctactacaaccacattggtgctgagtcgcgccgtggaccgttctggaaccttgctcccgttgaatcctccatcaccgatcactcgagctatctctcactccgagaggttgtgcgcggtttaatgaagcccaaaggctaa

SEQ ID NO: 691 - DNA, 1452 bp, unidentified
  source 1..1452: mol_type = other DNA
atggcagctttaggtgatggtgttccaccgattgcggacaataacaacccgcaaggaagagatgcaaatcccattaggggaggaactgatcccctacgaagagcaactgactggttggaagacaatagtaaaattactatgacgttccaccgtcatgctaactaccgaaggtatgcaacattgcgccttcaagagatgtttaatgctctggtacaattgtatcagaacatattcatgtcccattggcatcatttacgccggacagttgagaactaccaagttccagctccactggctcagacgccatggctttatgtagcacgtctatacatttctgtatggattgttgatctttacgcctctatacggcgcgcatgcttacgcgtgtgccctgaggcatacaacgagtattatactcaagattatcagcaggtagtctttgaatatgatgcttttctttcacagcttttgtctatgatcaaaccgaccgtggttaacctcgtccatgagaccactttgttcgttccacgactcgcagaagaccaaccgtttcctgccgacgacatgaacatattcggcttagatcgcttcgactacaacgaaaacgttgttcacggagttatctcgatcctccgagatcgtaaattgatgaaatttgaaaagccttcagaaactggattcggacgtcctttctggcttttcgattggcaccgaaccgggcacgcatacgcttggtttccagctgaaaacaactatgatatgcgagacgtaaccgtcgcatacatagtcggagtagcctgtactccaaaattaggaccacgtgatattgatgactggcaacactttccaggaaatatcattcccgaacatcctcgggcagaagatcacgtcagagtgcgccccgtagcgtaccatggagccgtagaagtacggaccatagacgtccaacaatggactgcaccaccagaggtcatgtcgctaattcaagtgaccctgcctccagcagctgcacagcaacaacaacaacagcagcccgcagcccaggcccaacctgctccagcccgccaacagccgcctgcacaacaacaacagcaggaacaaggtttaattagatataacctacggcaaggatttaaacggagaagaactgatccttcaacctccaatgataacgacatgcctgtcgaggacattgaggagccaccacaacctgaacaaggcgaagaccccatccacccggaagaggaagccgccccaccagtagagccgcagcccgatccagctccagcaccagcccctgcaccgcaagcccccgctgagccgatcataacgatgaatcgcgttagaaggtttcgcatcatcacttactgttactacagacaagtgaccgataatgaagacctgcattctcgtctcgctgcattacgacaagtggattcactgattgcatga

SEQ ID NO: 692 - DNA, 92 bp, Pepper cryptic virus 1
  source 1..92: mol_type = other DNA
agaatttcccccttgttccaaggcacctctcacgctccggtgccataaacaagagattgaaattaatcaatttatatacttacctcgttacg

SEQ ID NO: 693 - DNA, 31 bp, Pepper cryptic virus 1
  source 1..31: mol_type = other DNA
ataaatacgtggaaggtatttaaaccttacc

SEQ ID NO: 694 - DNA, 95 bp, Pepper cryptic virus 1
  source 1..95: mol_type = other DNA
agaatttgacctgaaccccatatcaggatcgaattatttacaaattcaccaaacacgtctaagcttgtgaaaattattgttatccctacattaac

SEQ ID NO: 695 - DNA, 178 bp, Pepper cryptic virus 1
  source 1..178: mol_type = other DNA
ttagctttcctttatgcttttgtcatgttataaacaatttcgtttaattttaatattaatcgcagttaattttatacatgtgctctgttatttgatatcagttccgcataatggacaggctacaatacccttcagtagggtcacaaacgtgacccaggaagctgtattgcaccctgct

SEQ ID NO: 696 - DNA, 80 bp, unidentified
  source 1..80: mol_type = other DNA
acaactcctgctcaagcttttgacaatcaaaatagaacgtcaatctcagttgctctatctcaacttgttacctactctac

SEQ ID NO: 697 - DNA, 35 bp, unidentified
  source 1..35: mol_type = other DNA
agccgatcgctttgattgtttaaaattaaaaaaaa

SEQ ID NO: 698 - DNA, 110 bp, unidentified
  source 1..110: mol_type = other DNA
gattaacagccttcataacgctttttgcaatcaaaatagaacgcaaatctcagctgctctaactcaactttttacttactctactgcttacccaagccgcccacaccaca

SEQ ID NO: 699 - DNA, 185 bp, unidentified
  source 1..185: mol_type = other DNA
gtttggacccagaagtccttaaactctaacccattttgctgtcaaacagtctatctgattagaaagggttttttttgctttaacttaacttttatctttaattttctctttcctatactgattcctcgcttcctcccgaagcgtattcttggaagctcagcttccgacctaggaacaaaaaaaaa

SEQ ID NO: 700 - DNA, 90 bp, Hop trefoil cryptic virus 2
  source 1..90: mol_type = other DNA
agatttttctaaagcggccccgctagaaattaagaattcacattcgtctacattatcaagttttcctgaacctctgctctaatccttaag

SEQ ID NO: 701 - DNA, 147 bp, Hop trefoil cryptic virus 2
  source 1..147: mol_type = other DNA
ttttgtttcgtttttcttctgaactttttagttcagcgttttcaacgttgttttctgtttatgaaaaaaaaaaaaaaaaaataaaaaaaaaaaaaaaaataaaaaaaaaaaaaaaaaaaaaaaaaacaaaaaataaaaaagttccct

SEQ ID NO: 702 - DNA, 109 bp, Hop trefoil cryptic virus 2
  source 1..109: mol_type = other DNA
agattttttataagcggcccccgcctataatatttagaattcacattcgtctaatttttccccttcacaaataactgctaaccccttttattttaactaacgtctcaca

SEQ ID NO: 703 - DNA, 81 bp, Hop trefoil cryptic virus 2
  source 1..81: mol_type = other DNA
tttttttgtgcttaatagcatgaaaatatttctcgctaatttaaaaaaaaaaaaaaaacaaaaaaatcaaaataaatccct

SEQ ID NO: 704 - protein, 746 aa, Hop trefoil cryptic virus 2
MPFNSVRNYLEERSVRVKKEMMTYQSSNRDPDAILEQSQDPDYRRYYDNARYNPSNDLKYRMLSKEYSTLVEAYRLRNDDKHQPYELHQPVPQDAAPVPSYRAPAPGIKPVPLMYHYGHVIHDPVSLTESAIDDDSDTLPDSDEPTVTHFGYPINKRIYDLICNRYPEYLSVISAYCRPIGTVDATFKDFNKEQIPSGPIDPNRKEEVLTHIFRFLDAQPYLPLHFVDTQFCKTPLVTGTGYHNRYSFKQKAHAKYSHPEEYAQMPTSKGYFYNATYENARTLVHYIKEYGLPFNIHYTPEDVDFTEEQIQAYIDSANNFFNDYPTLLFTRNHISKRDGTLKVRPVYAVDDLFIIIELMLTFPLTVQARKQSCCIMYGLETIRGSNHYIERLARSYSTYFSLDWSSYDQRLPRVITDIYYTDFLRRLIVINDGYQPTYEYPTYPDLDEHKMYTRMDNLLTFLHTWYNNMTFVLADGYAYRRTYCGVPSGLYNTQYLDSFGNLFLIIDAMIEFGFRTPEIDDFILLVLGDDNTGMTVISIDRIYDFITFLEIYALTRYNMVLSTTKSVLTTLRSKIETLGYQCNHGSPKRDISKLIAQLCYPENGLKPHTMASRAIGIAYASAGQDYMFHSFCQDVYNMFRLDYKPDARTTLNFQRQIYHNLDDGIPDLATPVVPPFPSIFEVREMYSRYQGPLTYAPKWNFAHFINSPDVTPAHYKTMRMYEIENNITIRPAPTFETVVPTTRNFP

SEQ ID NO: 705 - DNA, 2241 bp, Hop trefoil cryptic virus 2
  source 1..2241: mol_type = other DNA
atgccgttcaactcagttcgtaattatctcgaagaacgctccgttcgtgttaagaaagaaatgatgacatatcagtcatcaaaccgtgaccccgatgcaattcttgagcaatctcaagacccggactatcgtcgttattatgacaatgcccgatataatccttcaaatgatttgaagtatcgtatgctatcaaaggaatactctactctagttgaagcttaccgtctcagaaatgatgacaaacaccaaccgtatgaacttcatcagccagtcccacaagatgctgctcccgttccttcctaccgtgcccctgctcctggaataaaacccgttcccctcatgtaccactatggacatgttattcacgatcctgtctctctcaccgaatcagcaattgatgatgattccgatacccttcctgactccgatgagcccactgttactcactttggatacccaatcaataagcgtatttacgatttaatttgtaatcgctatcctgaatacctaagtgtaattagtgcttattgtcgtcctattggaacagttgatgctacatttaaggattttaataaggaacagatcccatctggacctattgatcccaatcgtaaagaagaagtgctaacccacatctttcgattcttagatgctcagccttacctgccccttcatttcgttgatacccagttttgcaaaacaccacttgtaactggaacaggctaccacaaccgctattctttcaaacagaaagcgcacgctaagtactctcatcctgaggaatacgctcaaatgccaacctcaaaaggctatttctacaatgccacttatgagaatgctcgcactcttgttcattatattaaggagtatggattaccttttaatatccattacactcctgaagatgttgacttcacagaagaacagattcaagcctatattgactctgccaacaacttctttaatgactacccgacgttattgttcacccgcaaccacatctctaaacgagatggaactcttaaagttcgtcccgtttatgctgttgatgacttgtttattataatcgagttgatgttgactttccccctcaccgtccaagctcgaaaacagtcttgttgcattatgtatggacttgaaaccattcgtggttccaaccattacattgaacgcctagctcgttcgtattcgacctacttctcccttgactggtccagttatgaccaacgactccctcgcgtcattactgatatttattacactgacttcctccgaagactcatagtaattaacgatggataccaaccgacctatgaatacccaacctaccctgaccttgatgaacacaaaatgtacacaagaatggataatttacttacctttctccatacctggtacaacaacatgaccttcgttttagctgatggttatgcctaccgcagaacttattgcggcgtaccctctggtctgtacaacactcaatacctcgattcttttggtaatctatttctaattatagatgctatgatcgaattcggtttcagaacccctgagatcgatgatttcattctccttgtccttggagatgataatactggtatgacggtcatttcaattgaccgaatctatgacttcatcacctttcttgaaatttacgcgctaacccgatataatatggtcctttcaacgaccaaatccgtgttaacaacgttacgctctaaaattgagactctcggttaccaatgtaaccacggttctcctaagcgtgatatttccaagctcattgcccagctctgttacccagagaatggactaaagccacatactatggcttcaagagcaattggaattgcgtatgcctctgctggccaagactacatgtttcactctttttgtcaagatgtgtataatatgtttaggttagactataaacctgatgctcgcaccactctgaattttcaacgtcaaatttatcataatttagatgatggaataccagatcttgcaacaccagtcgtgccaccattcccttcgatttttgaagttcgtgaaatgtactcccgttaccaaggtccactgacctatgctcctaaatggaatttcgctcactttatcaattccccggacgtgacacccgcccactacaaaactatgcgcatgtatgaaattgaaaataacattacaattcgacctgcccctacttttgaaacggtcgtgcccaccacaagaaatttcccgtga

SEQ ID NO: 706 - DNA, 64 bp, unidentified
  source 1..64: mol_type = other DNA
ccgtagttaaagctacggtaagtagcttagtagaaataattatatttttattcgctcccccgct

SEQ ID NO: 707 - DNA, 52 bp, unidentified
  source 1..52: mol_type = other DNA
tatttgtaatacgttttaaaataataaaagcgctcacgggaggttacgcccc

SEQ ID NO: 708 - DNA, 1389 bp, unidentified
  source 1..1389: mol_type = other DNA
atgggtaagagcacacacaacatttctggatacgttttcacagactttcaaggtgaacttgaagacttgcatgagacgcatacagaacgactccaaagggagtcaggcgttacatattatgatgagttcgcgaaagaagaactacttgatatgtatccaaacttatatgatcaatggattcgtgattggtctcggagtttctactcaggagataaacacttagaagccatatataggtatgccaaccaaaatcttcctatcacagctgtgaatcaagaagtctacgcagactcgattgacgcagttcgagatgggttacgtaaccttcacattgtgagggcgcattcggttagaaccgaactagaccaagtctattacatacaatcctcatcagcaggttacggttatcaaggtgcaaaaggtccgttatcagaatacaaccacgacagggccattcgacgtgcaaaagcaacactatattccgcaaccgcagaggacggagagggtattgaccatactattagagagtcagtcccggacgttggctacacgcgcacacaattgacagatctcactgaaaagacgaaggttagaagcgtatggggaagagctttccactatattcttcttgaaggcactagtgcaagaccacttttagaaggggtaatgaacagtgacactttcatccagataggcagtgatcccattgtcaacgtacattgtagcaatttcgacgcaacagtgcatcgatttgagattaacacagcatttgaccaactgaaagagcatatctactttccagatttcgataccgagatggcattcgaactcagtagacaactatttatccacaagaagatagcagctcctgacggtaaaatttactggtcacataaaggaattccatccggaagttactttacgtctttaatcggttcgatcgttaacagactacgcattgagtatctatggagattacaatgtggaagaggtcccatgacatgtaagaccttaggtgatgactcacttataggcgatgacatcttctatccacctgacaagcttcaagaaagagcactcagattaggctggacgattaacgcagaaaagacggaatgctcaacaaatccagcgagcgttacattcctcggaagaacgattcacggcggtcaaaaccaacgtgatctaaagagatgtgtacgtttactgattttaccagagtatcctgtaatttcaggtgcaatatccgcattcagagcacaagcaatagctgaagatgccggtggaaacagccaggtaatcaacgcgattgcgaaacgcttagagcgccgttacggtgtcgcttcggaagaagacgtaccgagttattttagaaggtatcaaatttaa

SEQ ID NO: 709 - DNA, 1029 bp, unidentified
  source 1..1029: mol_type = other DNA
acagttaaaactgaactagaccaagtctattatatacaatcctcagcagcaggttacggttatgaaggtgcaaaaggtcctatccacgaatttaatcatttaagggccattagacgtgcaaaggcaacactgtattccgcaacagcagaggacggtgaaggtattgactacgcaattacggagtcagtcccagacgtcggttacacgcgcactcaactgacagatctcactgagaagacgaaagtcagaagcgtatggggaagagctttccactatatccttcttgaaggacttaccgcaagaccactattagaagaggttatgcaaggtaacactttcattcagataggcagtgatcccattgtcaacgtaccacacattttatcagagacaaagaagcaatgcagatggctatattctgtagattggagtaacttcgacgccacagtgcatcgatttgaaatcaacgcagcatttgacctacttaaagagcatatcgagttcccagacttcgatacagagatgacattcgaatttagtcgtcaactctttattcacaagaaaatcgcagctcctgacggtaaaatttactggtcacacaaaggaattccatccggaagttactttacgtcattgatcggttcaattgtcaacagactacgcatcgagtatctatggagactacaatgtggcagaggacccatgtcatgtaagaccttaggtgatgattcacttattggcgatgatatcttctatccacctgacaaactccaagagagagcactcagattaggctggacgattaacgcagataagacggaatgctcaacaaacccagcgagcgtcacattcctcggaagaacagtccacggaggtcaaaatcaacgagacttaaagaggtgtttacgcttactgttattaccagagtaccccgtaatttcaggtgaaatatccgcatacagagcaaaagcaatcgctgaagatgcaggcaacaacagccaggtaatcaacgctattgctaaacgctta

SEQ ID NO: 710 - protein, 462 aa, unidentified
MGKSTHNISGYVFTDFQGELEDLHETHTERLQRESGVTYYDEFAKEELLDMYPNLYDQWIRDWSRSFYSGDKHLEAIYRYANQNLPITAVNQEVYADSIDAVRDGLRNLHIVRAHSVRTELDQVYYIQSSSAGYGYQGAKGPLSEYNHDRAIRRAKATLYSATAEDGEGIDHTIRESVPDVGYTRTQLTDLTEKTKVRSVWGRAFHYILLEGTSARPLLEGVMNSDTFIQIGSDPIVNVHCSNFDATVHRFEINTAFDQLKEHIYFPDFDTEMAFELSRQLFIHKKIAAPDGKIYWSHKGIPSGSYFTSLIGSIVNRLRIEYLWRLQCGRGPMTCKTLGDDSLIGDDIFYPPDKLQERALRLGWTINAEKTECSTNPASVTFLGRTIHGGQNQRDLKRCVRLLILPEYPVISGAISAFRAQAIAEDAGGNSQVINAIAKRLERRYGVASEEDVPSYFRRYQI

SEQ ID NO: 711 - DNA, 5054 bp, synthetic construct
  source 1..5054: mol_type = other DNA
acaactcctgctcaagcttttgacaatcaaaatagaacgtcaatctcagttgctctatctcaacttgttacctactctacgtatttttacaacaattaccaacaacaacaaacaacaaacaacattacaattactatttacaattacaaagctgactatgtgatcttattaaaattaggttaaatttcgaggttaaaaatagttttaatattgctatagtcttagaggtcttgtatatttatacttaccacacaagatggaccggagcagccctccaatatctagtgtaccctcgtgctcgctcaaacattaagtggtgttgtgcgaaaagaatctcacttcaaatggcatcttcttcttcttcttctagatggagctatgatgttttcttaagttttagaggcgaagatactcgaaaaacgtttacaagtcacttatacgaagtcttgaatgataagggaataaaaacctttcaagatgataaaaggctagagtacggcgcaaccatcccaggtgaactctgtaaagctatagaagagtctcaatttgccattgttgttttctcagagaattatgcaacatcaaggtggtgtttgaatgaactagtgaagatcatggaatgcaaaactcgatttaagcaaactgttataccgatattctatgatgtggatccatcacatgttcggaaccaaaaggagagctttgcaaaagcctttgaagaacatgaaacaaagtataaggatgatgttgagggaatacaaagatggaggattgctttaaatgaagcggccaatctcaaaggctcctgtgataatcgtgacaagactgatgcagactgtattcgacagattgttgaccaaatctcatccaaattatgcaagatttctttatcttatttgcaaaacattgttggaatagatactcatttagagaaaatagaatccttactagagataggaatcaatggtgttcggattatggggatctggggaatggggggagtcggtaaaacaacaatagcaagagctatatttgatactcttttaggaagaatggatagttcctatcaatttgatggtgcttgtttccttaaggatattaaagaaaacaaacgtggaatgcattctttgcaaaatgcccttctctctgaacttttaagggaaaaagctaattacaataatgaggaggatggaaagcaccaaatggctagtagacttcgttcgaagaaggtcctaattgtgcttgatgatatagataataaagatcattatttggagtatttagcaggtgatcttgattggtttggtaatggtagtagaattattataacaactagagacaagcatttgatagagaagaatgatataatatatgaggtgactgcactacccgatcatgaatccattcaattgttcaaacaacatgctttcggaaaagaagttccaaatgagaattttgagaagctttcattagaggtagtaaattatgctaaaggccttcctttagccctcaaagtgtggggttctttgctgcataacctacgattaactgaatggaaaagtgctatagagcacatgaaaaataactcttattctggaattattgataagctcaaaataagttatgatggattagagcccaaacaacaagagatgtttttagatatagcatgcttcttgcgaggggaagaaaaagattacatcctacaaatccttgagagttgtcatattggagctgaatacgggttacgtattttaattgacaaatctcttgtgttcatctctgaatataatcaggttcaaatgcatgacttaatacaggatatgggtaaatatatagtgaattttcaaaaagatcccggagaacgtagcagattatggctcgccaaggaagtcgaagaagtgatgagcaacaacacagggaccatggcaatggaagcaatttgggtttcttcttattctagtactctacgctttagcaatcaggccgtgaaaaatatgaaaaggcttagggtatttaacatggggaggtcgtcgacacattatgccatcgattatctgcccaacaacttgcgttgttttgtttgcactaactatccttgggagtcatttccatctacatttgaactcaaaatgcttgttcacctccaactccgacacaattctctgcgtcatttatggacagaaacaaagcatttgccgtctctacggaggatagatctcagctggtctaaaagattgacgcgaacaccagatttcacggggatgccaaatttggagtatgtgaatttgtatcaatgtagtaatcttgaagaagttcaccattccctgggatgttgcagcaaagtcattggtttatatttgaatgattgtaaaagccttaagaggtttccatgtgttaacgtggaatctcttgaatatctgggtctaagaagttgcgatagtttagagaaattgccagaaatctacgggagaatgaagccggagatacagattcacatgcaaggctctgggataagggaactaccatcatctatttttcagtacaaaactcatgttaccaagctattgttgtggaatatgaaaaaccttgtagctcttccaagcagcatatgtaggttgaaaagtttggttagtctgagtgtgtcgggttgctcaaaacttgaaagcttgccagaagagataggggatttagacaacttacgggtgtttgatgccagtgatactctaattttacgacctccgtcttccatcatacgcttgaacaaacttataatcttgatgtttcgaggcttcaaagatggagtgcactttgagttccctcctgtggctgaaggattacactcattggaatatctgaatctcagttactgcaatctaatagatggaggacttccggaagagattggatccttatcctctttgaaaaagttggatctcagtagaaataattttgagcatttgccttcaagtatagcccaacttggtgctcttcaatccttagacttaaaagattgccagaggcttacacagctaccagaacttcccccagaattaaatgaattgcatgtagattgtcatatggctctgaaatttatccattatttagtaacaaagagaaagaaactacatagagtgaaacttgatgatgcacacaatgatactatgtacaatttgtttgcatataccatgtttcagaatatctcttccatgaggcatgacatctctgcttcagattccttgtcactaacagtatttaccggtcaaccgtatcctgaaaagatcccgagttggttccaccatcagggttgggatagtagtgtatcagtcaatttgcctgaaaattggtatatacctgataaattcttgggatttgctgtatgttactctcgtagcttaattgacacaacagctcacttgattcccgtatgtgatgacaagatgtcgcgcatgacccagaaacttgccttatcagaatgtgatacagaatcatccaactattcagaatgggatatacattttttctttgtaccttttgctggcttatgggatacatctaaggcaaatggaaaaacaccaaatgattatgggattattaggctatctttttctggagaagagaagatgtatggacttcgtttgttgtataaagaaggaccagaggttaatgccttgttacaaatgagggaaaatagcaatgaaccaacagaacattccactgggataaggaggactcaatataacaacagaacttccttttatgagctcatcaatgggtgaggtagtcaagatgcataataaataacggattgtgtccgtaatcacacgtggtgcgtacgataacgcatagtgtttttccctccacttaaatcgaagggttgtgtcttggatcgcgcgggtcaaatgtatatggttcatatacatccgcaggcacgtaataaagcgaggggttcgaatccccccgttacccccggtaggggcccaagcacaacatttcaaccagaaacactagccgaagcaaatccattccacaagcacctggtgggatcatctcatcatcagaaaccaagagagagattccgtgtccgcttgttgtagtagattgtgaggactgaggaccgagaagcagccatggctctagttgttaaaggaaaagtgaatatcaatgagtttatcgacctgacaaaaatggagaagatcttaccgtcgatgtttacccctgtaaagagtgttatgtgttccaaagttgataaaataatggttcatgagaatgagtcattgtcagaggtgaaccttcttaaaggagttaagcttattgatagtggatacgtctgtttagccggtttggtcgtcacgggcgagtggaacttgcctgacaattgcagaggaggtgtgagcgtgtgtctggtggacaaaaggatggaaagagccgacgaggccactctcggatcttactacacagcagctgcaaagaaaagatttcagttcaaggtcgttcccaattatgctataaccacccaggacgcgatgaaaaacgtctggcaagttttagttaatattagaaatgtgaagatgtcagcgggtttctgtccgctttctctggagtttgtgtcggtgtgtattgtttatagaaataatataaaattaggtttgagagagaagattacaaacgtgagagacggagggcccatggaacttacagaagaagtcgttgatgagttcatggaagatgtccctatgtcgatcaggcttgcaaagtttcgatctcgaaccggaaaaaagagtgatgtccgcaaagggaaaaatagtagtaatgatcggtcagtgccgaacaagaactatagaaatgttaaggattttggaggaatgagttttaaaaagaataatttaatcgatgatgattcggaggctactgtcgccgaatcggattcgttttaaagacgcatccatggctgaatggttaaagcgcccaactcataattggcgaattcgtaggttcaattcctactggatgcaaagaagccgatcgctttgattgtttaaaattaaaaaaaa

SEQ ID NO: 712 - DNA, 5234 bp, synthetic construct
  source 1..5234: mol_type = other DNA
gattaacagccttcataacgctttttgcaatcaaaatagaacgcaaatctcagctgctctaactcaactttttacttactctactgcttacccaagccgcccacaccacagtatttttacaacaattaccaacaacaacaaacaacaaacaacattacaattactatttacaattacaaagctgactatgtgatcttattaaaattaggttaaatttcgaggttaaaaatagttttaatattgctatagtcttagaggtcttgtatatttatacttaccacacaagatggaccggagcagccctccaatatctagtgtaccctcgtgctcgctcaaacattaagtggtgttgtgcgaaaagaatctcacttcaaatggcatcttcttcttcttcttctagatggagctatgatgttttcttaagttttagaggcgaagatactcgaaaaacgtttacaagtcacttatacgaagtcttgaatgataagggaataaaaacctttcaagatgataaaaggctagagtacggcgcaaccatcccaggtgaactctgtaaagctatagaagagtctcaatttgccattgttgttttctcagagaattatgcaacatcaaggtggtgtttgaatgaactagtgaagatcatggaatgcaaaactcgatttaagcaaactgttataccgatattctatgatgtggatccatcacatgttcggaaccaaaaggagagctttgcaaaagcctttgaagaacatgaaacaaagtataaggatgatgttgagggaatacaaagatggaggattgctttaaatgaagcggccaatctcaaaggctcctgtgataatcgtgacaagactgatgcagactgtattcgacagattgttgaccaaatctcatccaaattatgcaagatttctttatcttatttgcaaaacattgttggaatagatactcatttagagaaaatagaatccttactagagataggaatcaatggtgttcggattatggggatctggggaatggggggagtcggtaaaacaacaatagcaagagctatatttgatactcttttaggaagaatggatagttcctatcaatttgatggtgcttgtttccttaaggatattaaagaaaacaaacgtggaatgcattctttgcaaaatgcccttctctctgaacttttaagggaaaaagctaattacaataatgaggaggatggaaagcaccaaatggctagtagacttcgttcgaagaaggtcctaattgtgcttgatgatatagataataaagatcattatttggagtatttagcaggtgatcttgattggtttggtaatggtagtagaattattataacaactagagacaagcatttgatagagaagaatgatataatatatgaggtgactgcactacccgatcatgaatccattcaattgttcaaacaacatgctttcggaaaagaagttccaaatgagaattttgagaagctttcattagaggtagtaaattatgctaaaggccttcctttagccctcaaagtgtggggttctttgctgcataacctacgattaactgaatggaaaagtgctatagagcacatgaaaaataactcttattctggaattattgataagctcaaaataagttatgatggattagagcccaaacaacaagagatgtttttagatatagcatgcttcttgcgaggggaagaaaaagattacatcctacaaatccttgagagttgtcatattggagctgaatacgggttacgtattttaattgacaaatctcttgtgttcatctctgaatataatcaggttcaaatgcatgacttaatacaggatatgggtaaatatatagtgaattttcaaaaagatcccggagaacgtagcagattatggctcgccaaggaagtcgaagaagtgatgagcaacaacacagggaccatggcaatggaagcaatttgggtttcttcttattctagtactctacgctttagcaatcaggccgtgaaaaatatgaaaaggcttagggtatttaacatggggaggtcgtcgacacattatgccatcgattatctgcccaacaacttgcgttgttttgtttgcactaactatccttgggagtcatttccatctacatttgaactcaaaatgcttgttcacctccaactccgacacaattctctgcgtcatttatggacagaaacaaagcatttgccgtctctacggaggatagatctcagctggtctaaaagattgacgcgaacaccagatttcacggggatgccaaatttggagtatgtgaatttgtatcaatgtagtaatcttgaagaagttcaccattccctgggatgttgcagcaaagtcattggtttatatttgaatgattgtaaaagccttaagaggtttccatgtgttaacgtggaatctcttgaatatctgggtctaagaagttgcgatagtttagagaaattgccagaaatctacgggagaatgaagccggagatacagattcacatgcaaggctctgggataagggaactaccatcatctatttttcagtacaaaactcatgttaccaagctattgttgtggaatatgaaaaaccttgtagctcttccaagcagcatatgtaggttgaaaagtttggttagtctgagtgtgtcgggttgctcaaaacttgaaagcttgccagaagagataggggatttagacaacttacgggtgtttgatgccagtgatactctaattttacgacctccgtcttccatcatacgcttgaacaaacttataatcttgatgtttcgaggcttcaaagatggagtgcactttgagttccctcctgtggctgaaggattacactcattggaatatctgaatctcagttactgcaatctaatagatggaggacttccggaagagattggatccttatcctctttgaaaaagttggatctcagtagaaataattttgagcatttgccttcaagtatagcccaacttggtgctcttcaatccttagacttaaaagattgccagaggcttacacagctaccagaacttcccccagaattaaatgaattgcatgtagattgtcatatggctctgaaatttatccattatttagtaacaaagagaaagaaactacatagagtgaaacttgatgatgcacacaatgatactatgtacaatttgtttgcatataccatgtttcagaatatctcttccatgaggcatgacatctctgcttcagattccttgtcactaacagtatttaccggtcaaccgtatcctgaaaagatcccgagttggttccaccatcagggttgggatagtagtgtatcagtcaatttgcctgaaaattggtatatacctgataaattcttgggatttgctgtatgttactctcgtagcttaattgacacaacagctcacttgattcccgtatgtgatgacaagatgtcgcgcatgacccagaaacttgccttatcagaatgtgatacagaatcatccaactattcagaatgggatatacattttttctttgtaccttttgctggcttatgggatacatctaaggcaaatggaaaaacaccaaatgattatgggattattaggctatctttttctggagaagagaagatgtatggacttcgtttgttgtataaagaaggaccagaggttaatgccttgttacaaatgagggaaaatagcaatgaaccaacagaacattccactgggataaggaggactcaatataacaacagaacttccttttatgagctcatcaatgggtgaggtagtcaagatgcataataaataacggattgtgtccgtaatcacacgtggtgcgtacgataacgcatagtgtttttccctccacttaaatcgaagggttgtgtcttggatcgcgcgggtcaaatgtatatggttcatatacatccgcaggcacgtaataaagcgaggggttcgaatccccccgttacccccggtaggggcccaagcacaacatttcaaccagaaacactagccgaagcaaatccattccacaagcacctggtgggatcatctcatcatcagaaaccaagagagagattccgtgtccgcttgttgtagtagattgtgaggactgaggaccgagaagcagccatggctctagttgttaaaggaaaagtgaatatcaatgagtttatcgacctgacaaaaatggagaagatcttaccgtcgatgtttacccctgtaaagagtgttatgtgttccaaagttgataaaataatggttcatgagaatgagtcattgtcagaggtgaaccttcttaaaggagttaagcttattgatagtggatacgtctgtttagccggtttggtcgtcacgggcgagtggaacttgcctgacaattgcagaggaggtgtgagcgtgtgtctggtggacaaaaggatggaaagagccgacgaggccactctcggatcttactacacagcagctgcaaagaaaagatttcagttcaaggtcgttcccaattatgctataaccacccaggacgcgatgaaaaacgtctggcaagttttagttaatattagaaatgtgaagatgtcagcgggtttctgtccgctttctctggagtttgtgtcggtgtgtattgtttatagaaataatataaaattaggtttgagagagaagattacaaacgtgagagacggagggcccatggaacttacagaagaagtcgttgatgagttcatggaagatgtccctatgtcgatcaggcttgcaaagtttcgatctcgaaccggaaaaaagagtgatgtccgcaaagggaaaaatagtagtaatgatcggtcagtgccgaacaagaactatagaaatgttaaggattttggaggaatgagttttaaaaagaataatttaatcgatgatgattcggaggctactgtcgccgaatcggattcgttttaaagacgcatccatggctgaatggttaaagcgcccaactcataattggcgaattcgtaggttcaattcctactggatgcaaagagtttggacccagaagtccttaaactctaacccattttgctgtcaaacagtctatctgattagaaagggttttttttgctttaacttaacttttatctttaattttctctttcctatactgattcctcgcttcctcccgaagcgtattcttggaagctcagcttccgacctaggaacaaaaaaaaa

SEQ ID NO: 713 - DNA, 2401 bp, synthetic construct
  source 1..2401: mol_type = other DNA
acaactcctgctcaagcttttgacaatcaaaatagaacgtcaatctcagttgctctatctcaacttgttacctactctacgtatttttacaacaattaccaacaacaacaaacaacaaacaacattacaattactatttacaattacacacaaacacgtttttattccggctgtgtagtctttcaacgttgtcttccgatgcccgtgtttccaaacttcagccaagaaatcgtctaagcctaaccttttccaaatctcatactcgactgcacaatgaaattcgttctgtgatttgtcatacttggaaatgtctagctctaatatgtccataggaacattagagtccagatctgagaaaaattcttcgatctgtgtaggcgttttccttgtataaaacatgaatcttgaactgtcaattgtctctagcagctgtcttgttaattctgaaaatacaggaccaaaaagcgcattgattttcttgctatgatacacaatagtttgcaaagccgggtattcagtttgaatactaagatccaaacgctgtttcggctgctgcttgatcatgtgcctgtattgatcaacggctggtaaatcaataaagtcaaaatcagccaactggccaattgttgacttctcttgcttttcgatccatctttccaaactcgcccttgaaagcagaggtatattttttggttttttcttttctttaattaagtatgcatcaaaaaacttatctactactagagaagcggtgtcttcgatgtcaacaacccctactaattcgggagagttgaaatttcttttgatcatcgcgaccaaattttccaacaatccaggttttcgaggtttttcagcagcagtcctgatcacaggtttcaatgtcgtctcagattctctcggaagaggcaccgatttcgacatatccaacacacaatccttgacattcaaactattctctcgtatttgcatagttacagcatcatactcattgagtatagtactgtttcccggcaaacacttgtcgtaataatattgcatgtcagaaacatctcctgtttttggtgctgcgacgaaaaggttaacacctttgtacaccgattctatctgtaattgctattgagtcgacggtagtcaagatgcataataaataacggattgtgtccgtaatcacacgtggtgcgtacgataacgcatagtgtttttccctccacttaaatcgaagggttgtgtcttggatcgcgcgggtcaaatgtatatggttcatatacatccgcaggcacgtaataaagcgaggggttcgaatccccccgttacccccggtaggggcccaagcacaacatttcaaccagaaacactagccgaagcaaatccattccacaagcacctggtgggatcatctcatcatcagaaaccaagagagagattccgtgtccgcttgttgtagtagattgtgaggactgaggaccgagaagcagccatggctctagttgttaaaggaaaagtgaatatcaatgagtttatcgacctgacaaaaatggagaagatcttaccgtcgatgtttacccctgtaaagagtgttatgtgttccaaagttgataaaataatggttcatgagaatgagtcattgtcagaggtgaaccttcttaaaggagttaagcttattgatagtggatacgtctgtttagccggtttggtcgtcacgggcgagtggaacttgcctgacaattgcagaggaggtgtgagcgtgtgtctggtggacaaaaggatggaaagagccgacgaggccactctcggatcttactacacagcagctgcaaagaaaagatttcagttcaaggtcgttcccaattatgctataaccacccaggacgcgatgaaaaacgtctggcaagttttagttaatattagaaatgtgaagatgtcagcgggtttctgtccgctttctctggagtttgtgtcggtgtgtattgtttatagaaataatataaaattaggtttgagagagaagattacaaacgtgagagacggagggcccatggaacttacagaagaagtcgttgatgagttcatggaagatgtccctatgtcgatcaggcttgcaaagtttcgatctcgaaccggaaaaaagagtgatgtccgcaaagggaaaaatagtagtaatgatcggtcagtgccgaacaagaactatagaaatgttaaggattttggaggaatgagttttaaaaagaataatttaatcgatgatgattcggaggctactgtcgccgaatcggattcgttttaaagacgcatccatggctgaatggttaaagcgcccaactcataattggcgaattcgtaggttcaattcctactggatgcaaagaagccgatcgctttgattgtttaaaattaaaaaaaa

SEQ ID NO: 714 - DNA, 2581 bp, synthetic construct
  source 1..2581: mol_type = other DNA
gattaacagccttcataacgctttttgcaatcaaaatagaacgcaaatctcagctgctctaactcaactttttacttactctactgcttacccaagccgcccacaccacagtatttttacaacaattaccaacaacaacaaacaacaaacaacattacaattactatttacaattacacacaaacacgtttttattccggctgtgtagtctttcaacgttgtcttccgatgcccgtgtttccaaacttcagccaagaaatcgtctaagcctaaccttttccaaatctcatactcgactgcacaatgaaattcgttctgtgatttgtcatacttggaaatgtctagctctaatatgtccataggaacattagagtccagatctgagaaaaattcttcgatctgtgtaggcgttttccttgtataaaacatgaatcttgaactgtcaattgtctctagcagctgtcttgttaattctgaaaatacaggaccaaaaagcgcattgattttcttgctatgatacacaatagtttgcaaagccgggtattcagtttgaatactaagatccaaacgctgtttcggctgctgcttgatcatgtgcctgtattgatcaacggctggtaaatcaataaagtcaaaatcagccaactggccaattgttgacttctcttgcttttcgatccatctttccaaactcgcccttgaaagcagaggtatattttttggttttttcttttctttaattaagtatgcatcaaaaaacttatctactactagagaagcggtgtcttcgatgtcaacaacccctactaattcgggagagttgaaatttcttttgatcatcgcgaccaaattttccaacaatccaggttttcgaggtttttcagcagcagtcctgatcacaggtttcaatgtcgtctcagattctctcggaagaggcaccgatttcgacatatccaacacacaatccttgacattcaaactattctctcgtatttgcatagttacagcatcatactcattgagtatagtactgtttcccggcaaacacttgtcgtaataatattgcatgtcagaaacatctcctgtttttggtgctgcgacgaaaaggttaacacctttgtacaccgattctatctgtaattgctattgagtcgacggtagtcaagatgcataataaataacggattgtgtccgtaatcacacgtggtgcgtacgataacgcatagtgtttttccctccacttaaatcgaagggttgtgtcttggatcgcgcgggtcaaatgtatatggttcatatacatccgcaggcacgtaataaagcgaggggttcgaatccccccgttacccccggtaggggcccaagcacaacatttcaaccagaaacactagccgaagcaaatccattccacaagcacctggtgggatcatctcatcatcagaaaccaagagagagattccgtgtccgcttgttgtagtagattgtgaggactgaggaccgagaagcagccatggctctagttgttaaaggaaaagtgaatatcaatgagtttatcgacctgacaaaaatggagaagatcttaccgtcgatgtttacccctgtaaagagtgttatgtgttccaaagttgataaaataatggttcatgagaatgagtcattgtcagaggtgaaccttcttaaaggagttaagcttattgatagtggatacgtctgtttagccggtttggtcgtcacgggcgagtggaacttgcctgacaattgcagaggaggtgtgagcgtgtgtctggtggacaaaaggatggaaagagccgacgaggccactctcggatcttactacacagcagctgcaaagaaaagatttcagttcaaggtcgttcccaattatgctataaccacccaggacgcgatgaaaaacgtctggcaagttttagttaatattagaaatgtgaagatgtcagcgggtttctgtccgctttctctggagtttgtgtcggtgtgtattgtttatagaaataatataaaattaggtttgagagagaagattacaaacgtgagagacggagggcccatggaacttacagaagaagtcgttgatgagttcatggaagatgtccctatgtcgatcaggcttgcaaagtttcgatctcgaaccggaaaaaagagtgatgtccgcaaagggaaaaatagtagtaatgatcggtcagtgccgaacaagaactatagaaatgttaaggattttggaggaatgagttttaaaaagaataatttaatcgatgatgattcggaggctactgtcgccgaatcggattcgttttaaagacgcatccatggctgaatggttaaagcgcccaactcataattggcgaattcgtaggttcaattcctactggatgcaaagagtttggacccagaagtccttaaactctaacccattttgctgtcaaacagtctatctgattagaaagggttttttttgctttaacttaacttttatctttaattttctctttcctatactgattcctcgcttcctcccgaagcgtattcttggaagctcagcttccgacctaggaacaaaaaaaaa

SEQ ID NO: 715 - protein, 602 aa, Alphapartitivirus sp.
MDYLTTLFSRLTNFVFGQRNLEYVGRYHAPPHSVRPNPFNIENHQKTLDHAFRRYLYPPEIDMIENQLRRSDVSEEAILSDFFANDVEPHDVPMDEHFEYGLASMLDAFRPPQKCLPAHLYDVEHHYPYKWQVNAEAPFSTDENFLARRPTFGQIFERLSDLYSHIAVDWSRRYGNKKNDQTFLNDVVPAKFGPMKETVFSWTHRWQHVIKSGFTDLAGLFKDYYFNTRYIFPMLLHTKTAIVKKDDPNKMRTIWGCSKPWVISDTQFYWEYVAWIKLNPGITPMLWGFETFTGGWLRLNAQLFSQYLQHSFVTLDWKRFDKRAYFSVIKRIMYGVREFLDFENGYLPTKDYPDTVSDWTHERSLKLERLWLWTLENLFNAPIVLPDGSTYIRHFAGIPSGLFITQLLDSWYNYTMLATLLSALGFNPKACIIKVQGDDSIIRLNVLLPPDDHDSFLAKLQDLADYYFKSVISLEKSEVKNTLNGCEVLSYRNRFGLPYRDEIAMLAQFYHTKARNPSPEITMAQAIGFAFASCGNHKRVLSVLQDVYEYYAQQGFTPNRAGLSLVFGNSPDLVIPHYDLSHFPTEYEIKQFLTNAVYHNAE

SEQ ID NO: 716 - protein, 616 aa, Beet cryptic virus 1; identical to SEQ ID NO: 597

SEQ ID NO: 717 - protein, 591 aa, Bondarzewia berkeleyi partitivirus 1
MQLPFFTKVKEFFYNKFNPELSEFREHYEFKHCLKYIGRTTPRHIPTRHPSQYAEYQAVVKEAIEYVYPGYVSEHVINDYHHPEATYDLILSTLIKADKPIHNVPQDEHFQLGWALTADAFRPPQPLRPVHLADMRFYRWNWYPNVEAPFSTDKKLIAAVSEAAKAGILPNAKMSFGNLKHVVFTRLRTFMHQIKRNQITDPAHRYPEVTIHVKPALTGTDKYKIRVIAGVSKLHVIPSAQRFWPLFRHWIESKDSPMLWGYETILGGMQKLHLDMTIPRLMWKTFVTIDWPAYDLQINFEERRRCYVTYEQYFDFNNGYIPTKFYPESTADPDHLHRAWDWIVEATRKMPIVLPDGSMYVMADGYWFVFSGLFQTQSDDSLINHARILTIMSSLGFEVTSSVRLKVQGDDSLTKLVFFVPPNEHDAFKEAFSKKALFYFDSDVRPEKSNIHNDPQGVECLGYQNNNGYPERDEVKLIAMLLHPRGSPTLDTLMAKCAGFAYADCYRHPRVIEVLQRIWNKLQAQGHSPGLLRTQRDVLLHGETKFEIPTDHFPSMNEVTRHLRTPYVRNLIDKEFYFPGYTRTSHFQSLF

SEQ ID NO: 718 - protein, 616 aa, Carrot cryptic virus; identical to SEQ ID NO: 607

SEQ ID NO: 719 - protein, 621 aa, Cherry chlorotic rusty spot associated partitivirus
MDHLTSLFELFAITPKTQNNLQFVGIYHRPPHSVRANLRNVEKHKITVAHAMHKYLYPHEIDFVINQMRRSNVTEDAILADFFDNNVEPLEPVLDEHFERGLSAMLDAFRPPQKCLPAHIYDVQHHYPYKWQVNAEAPFSTDSYFLANRPTFRAVFERLESLYTHLATDWHRRYGNKTDNDDFMNDHVPAKFGPMKETVFSWTHRWHHVIKSNFTDTAGLSKDYYFKNRYIFPMLLHTKTAIVKKDDPNKMRTIWGCSKPWIIADTMLWWEYVAYAKLQPGATPMLWSYETFTGGWLRLNHALFSSYIRHSYITLDWKRFDKKAYFCIIDKIFDGVETFLDFDNGYLPTKDYPDTKSTWTQGRSTRIKRLFDWTKENFYHAPIVLPNGHMYVRQFAGIPSGLFITQLIDSWYNYTMLATILSAMGFDPRSCIIKVQGDDSIIRLSALIPPDAHDSFLTKVQELADYYFQSVVSVNKSEVRNELNGCEVLSYRHRHGLPYRDELAMLAQLYHTKARNPSPEITMAQSIGFAYASFGNHERVRLVLHDIYEYYKHQGYTPNRAGLSLVFGNSPDLMIPHYTLDHFPTLREIKMFLTNANYANEETNSRTWPLNHFLSLPCHRT

SEQ ID NO: 720 - protein, 587 aa, Chondrostereum purpureum cryptic virus 1
MRFTEYILSGFKVLDSSMDRSRNYQFIGFDKPESQPPADATMHHAVQAPVKHAMRKILLHNEFVHITTKFKRSTIDDSSITEAFFKGDLPYHKVPKDGSYQRALAATMQVFAPQVPIKPVHYCDLRYYPWKLRPSAELPFTDDPALFKRVQHAAERKQIPDKRMSFGNLYNHIFEYLRPIIHYIKNGPFHLPFKTSWPQDDYLTPMRSHARSAIQPISDPNKVRFVYGYPKVGIFPQAMFFWPLFVYYHITGQSPLLWGYETMTGGWYRLNHELRSTPGISGSILELDWQGFDIHALFEVFDDIKNLSWSFFDCSHGYQPTKDYQGTSCDPDRLKNLWEWIWFSIKYTPIRLPDGRLFRRSWRGVPSGLFITQWLDSVYNCIMIFTILDAMGFEITSDLIIKVLGDDSLTRLRLLIPYDQHEAFTIRFKHLAQYYFDAVLSDKKSRIHNTLNGVKCLGYRNNNGLPVRDRESLLTALLYPKARRPTFEQLKARCIGIAYASAGNDPTTLEVCKDVYDYLDAKGIKADPAGLADLFDPNLGLDIDITFFPNILTIQRSLLILRDSREQAHRMWPTSHFLSPIPGLVDI

SEQ ID NO: 721 - protein, 565 aa, Enontekio alphapartitivirus 1
MNPINKNANLLYIGNDPAKAPQVHPSYLTYRHVNPVIHAMKTALNKDEIENITEGFRRSDFSQEALIADYLRGEIPKHNVIKDEHYEKALNHTRLAFKPEHTYRPVSFPDLRYYPWTISTSAEAPYTTSKYWKSYVKIKYEMNEVDNERLTFHNLYNEIFRHNREKIHRIKDGIYTDRNGEDLKYWNQAHARSHLVTKDEPDKIRMVYGVPKLLLMTEAMFLWPLVNDLVNRDSPMLWGYETLKGGWYSIYNWMTRTSPTCATYLALDWKGFDKRAQFTIIDDIHDVIRSYMSFEDGYMPTFDYPESETNPERITNLWDWMRDAVKHTPDVLPNGDIYVRQHAGIASGYFQTQLLDSMYNNLMLLTVLSRMGINISKIKMKVQGDDSIIGLIELIPEAAHPSFMATFSYYATEYFGAVLNVKKSHMSNQLNGLPLLGFTNIMGIPSRDRNELLASLLRPERKSDEAKLMARAVGIAYANCGYHPEIYRICENIYRYLQSLGFSPNAQGLPHNVLALQDWFELLNCNDTLEFPTYFETICRLTETPTRSRTQTERLWPTTHFISKF

SEQ ID NO: 722 - protein, 426 aa, Enontekio alphapartitivirus 2
MSGSAELPYVTDDDAKEYIIKRFEANEIQNRRLTKGNLMNYMLIKERSKIHNIKEGVQGLSSLHYVKVHVRSHLSTRDKNKVRVVLGVPYTLLLVEMMLLSSLTNHIYRNCDFVGWGYETFKGGLKKLRDKFGNYTAYLSLDFSAFDKRIPHWMIRDIHSIWNSSIDNSRYYVDDPRYPDSNANPDRTQRLWNFMYEGVTQCTYLMPDGSKWKYEHSGFGSGLYQTQLLGSCANFVMITSALLSIGFTADEFKIVVLGDDSLICLNYEGNLKMLLLQITTFCKNNFNALINVEKSVFYNSSEHLQFLSYKYVNGVVTRVRKDLLARLLFPENGKYSAGTTKSRALGIMMSNLGDDLEVHDVCRRILDELKDVPYDEEEQDWFDKIKLDFALKKFEGSIPTRDDLMRLANTIPEDIYVDNVFDYLFK

SEQ ID NO: 723 - protein, 432 aa, Hanko alphapartitivirus 1
MYDLNKSGSAELPYTRDSSFKKHVHERFLKGEIVNEALTKGNGENFILFKERGKLHQIKDQILPNEKLLHDIRMHARSHLTTSDSDDKVRAVYGVPCTVIYAEIMIFWPLLAHLKTQENSFIAWGYETFRGGLEKLRREVHDYDIHLSLDFSTFDKLIPFWLIDDIYQVWMSLYEFGPYYEDDPDYPNPKTEPQRIKNIWNFVQYAVKHSVYRAPDGSRYKRKHSGFPSGLLQTQLLGSCCNYVMIVTCLNKLGFSENDFSIKVLGDDSCISLRTQKPPFDIIRDISQISKRLFNARINADKSTYSVGTSNLQFLSYKMTNGAVTRVNDDLLGKLIYPEKAHFTRETTKSRALGVLVSNLGYDEHVHIVCCNIINKLSEYSYTTRGLNWYDQKKLEIFKKYTKTLPSRHDLFIMALTPQPNLNDENFDKYIR

SEQ ID NO: 724 - protein, 352 aa, Hanko alphapartitivirus 2
MFFWPLFAYYKSHKGSSPLLWGYETFNGGWMRLNAELMHNYLRSSILMIDWKRFDKHALFSVIDDIFDIQRSYLDFSRGYVPTIDYSDTAADWDANKEARIQRLWQWTLDAFKCTPVLLPNGEVYSRRHAGLPSGLYTTQYLDSMYNCVMLITILSAMEIPLSKDMIIKLMGDDSLIRLLVCIQPNLHADFLLKMQYFASTYFNSTISIEKSKMINRPNGAEVLSYINHNGLPHRDPTSLLAQFYHTKARNPTPGKTMATAIGIAYASCGFDKQVYYVCKDVYAYYNAQGIEPDPTGLSLALGDDPFGIDPASIALTHFPSFHEIQANLTALDYVSSSVSRFWPTSHFSEPY

SEQ ID NO: 725 - protein, 581 aa, Hanko alphapartitivirus 3
MENLLPKSSSNSSNLDLVRHDPLHGSIPKFLKEHNDFYFIGQTLVLSAIATYAALLPPGSYDRIKNFRRSYAGAEEAEAFFQRYDVEPFTIVKDDLYLQALDIVTEWFRPKSPIHPVHFLDLHMYPWNLSTSAERPFSTNNDLKSGLIHLKIAGLIDNARMSFHNLYDHIFTYCRTYTHRVKDGLKPPLHPITLHIKPALVDEHSDDKVRTIFGVPKPIIFLEAMFLWPLYSTYFKEQTSPLLWNYETLQGGWSRLNDEWISNFRSYKPVFNLDWSEFDMRVYYSMWQDCLDRIKTYFCFCGRYHPTHTHPRAHTSPNRLHNIWDYLQHAYFNTMAVSTTGNEYKRRFAGMPSGIFGTQFYDSFYNSVMVVTTLLALDHPVDPNHFIKVMGDDVIFGTLSNMTAAESAAFLDSFAIEANRRFNSKLSPTKSGVSPTIQGASILSYTNWNGYPKRDPVQLLAQLLHPKSLRDTPPRLMARAIGIYYASAGDHRLRPICEQVYSELKFQGYSPNQAAFDKLFDPRSLGLEHIDLSHFPSKTEVISRLSSPSKRNPDLQAIYWPLTHFSSEAGFDIQCHSPRSE

SEQ ID NO: 726 - protein, 706 aa, Helicobasidium mompa partitivirus V70
MFNTVRNYLAEKTNNLLLQMQAFQRSQSHPDDPDLLVNDSDLRRHEQSFRDHPTELRRVKEYQQNYDQIVSSLDQKNALKDQHFEFFSPSDPTSFPADRLPAPGIQILPLRYHSTNPVIATNLVPETGFPLHPLIHYLVYRKYPRYIPYVEKYVRPLGTTDATFSDFNREQVKIAPLDPERKRTVLTLCKHFLACVPYLPIHFVDFMYAKLPLHTGTGYFNRFSYDAQAHASFAHPEQYHDRHTSKGYYINTTMQYARTIVHRLKQFALPFNPKDFDSSSIFSRMRFFFLTRPTMLFTRNHISDRDGNLKQRPVYAVDDLFLILEVMLTFPLLVMARLPECCIMYGLETIRGSNHWIDSTAKRFRSYFTIDWSQYDQRLPRCITDLYYTDFLESLIIINFGYQPTADYADYPDLTPDMMFTRMTNLLHFLHTWYNNMVYVTADGFAYIRKFCGVPSGLFNTQYLDSFGNLYLIIDGMLEFGISIDEITSVLLLIMGDDNSGFTHWELLRLTHFLDFFENYALVRYNMVLSKSKSVITRFRNRIETLSYSANFGMPTRPLGKLVAQLCYPEHGVIDKYMSSRAIGIAYAAAGMDPSFHRFCEDVYLTFLPYAAPIDSSSLERIIKHLPGQFKMLDAYTDHVNLESFPSIHEVRLKYSKWQGPLDLDSKWNPAHFTSPPNLPPQGFFTIEDWRTLHNIPRPPVTDYFP

SEQ ID NO: 727 - protein, 538 aa, Helicobasidium mompa partitivirus V70
MSAFWNLEFHGMDPFAPNIPQFLLSPSQHYVSNHAIIKDQFHYQALDIVTEWFRPPHPIHPVHYTDLRWYPWKLSMSAERPFTFMQSAKDYVKQRYEAGLIPNRSLKFGNLYTPIFEYCRHYHHNVKNGRSPILDLITLHVKPALVLVSSGIDKVRTVFGVPKYLIFAEAMFFWPLFSIYFTSANTPLLWNYESLNGGWHRLDSEYHARYTMYSPIFNLDWSEFDMRVYFTVWSDIIDRVSTYFCFCGRYCPTLPVLDEETGTQLHPPYSEPFTNPQRLRNLWFWIRYAYFNMAAVTTTGKIFKRSFAGMPSGIFCTQFYDSFYNAVIIVTCLLALGYEVRHDHLIKLMGDDALFGLLESIPIEHWSEFLDALAAEALFRFNAKLSATKCGYTRTIQGATVLSYTNWNGWPVRSAEDVLAHLLHPKSLKDSAPRLMARSIGLYYASGANPRIRPICEHIFSTLKHQGFTVRKVNLAEFMDPRGLGTYNIEVDNFPSPLEAMCRLSRPSTRSEEIQSQYWDRSHFEFDAGQVRNCQSSF

SEQ ID NO: 728 - protein, 621 aa, Heterobasidion partitivirus 1
MDYLTGLFSRVLHISRKVTNFEFAGTYHYQPSIPQVNEVATENHKRTLRHSFRTYLTSDEYDKIVNGYKRTNLDPSTITEDFFSGDIEDHPEPTDFKSQLSIEYGLQCMIDAFKPPAPARVCHLYDVQWHYPFKWQVNAEAPFSTEKYFLDLRKKFGDFFDPVTKLWTKYVNPLDALRRYGHTPPADTLNQVTPPKFGFMKNLIFSFVHSWQHVIKSRFTSNAGITHSNFLRQRFLFPMLLHIKTAIVSFDAPNKLRSIWGVSKLWIISEAMIYWEYIAWIKLNPGSTPMLWGYETFTGGWFRLWRDLHTPGEDVTYITIDWSRFDKRAYFWLIRKIFIRTRCFLDFTNGYVSTKDYPTSPTDPDKLQALWEWTIEAFFDSPIVLPDGSMFKRLFAGIPSGLFITQLMDSWYNYTMLAAILHYMGYDPRRCIIKVQGDDSIIRLYIQIPLHEHDLFLLRMQEVSDHLFGAKISFEKSELRNSLIGSEVLSYRNIQGLPYRDLIKMLAQFYHTKAKDPTPEITMAQAIGFAYAACGNDFRIHELLRSVYDYYKAQGFTPNPAGLTVVFGDSPDRPDYPISLDEFPSQMDVQRFFLSTDYRNADQENRTWPSSHFLYAPCSRI

SEQ ID NO: 729 - protein, 585 aa, Heterobasidion partitivirus 12
MQTLLSAVYSIRDAIFGKTLSEPHGLNVNFHFDGYVTDEIKTSIPPRVEMWYSDYQKFLNPIIRANFTGAEADKIINGYHHPVATIPFMVENLKKGDLSDHPVPHDEHYLRARKMAADAFRPPRPIRPVHFADLRFYNWNWHPNVEEPYYSNKRAQEYVQAAHTLGLTPDARMSFGNLRDYVFMDTRHYLHQIKRNEISNPKTLWPLMKIHVKPALTGTDEQKIRVIYGVSKRHVLPQCMFFWPLFRHYIENDTDPLLWGFETILGGMMKLNSLMHRLYFQTFVTVDWSGFDLRSLFSIQREIFDDWRTYFDFSNGYIPTVWYPNSTADPIQLERLWNWQRDACFNMPFVMPDKSVYRRLFRAIPSGLFVTQFLDSHYNYIMLLTILSAMGFDITIERIRILVQGDDSLKNLIFFIPANQHDNFKAEFQRLATYYFDHVARPEKTEIYNSPQGVTVLGYTNNNGFPTRDPIKLMAQLYHPRQVGERWKSVLMAKCAGFAYASAYNYPKVTATLKTVYYKLAAKGFSPAALRTQRDIVLFGEAKFQVPTDHFPTAEEVQRHLRVPYKRTEEDSESYFPMKHFLDFA

SEQ ID NO: 730 - protein, 581 aa, Heterobasidion partitivirus 13
MLPIISQVTDYVYRKFIKPAPTQFKNNYLFQNWLSPLTTPHRDATKYAEYQAYLEKHIRSNLLGSDAEYVIKRFHHPIATIDSVNETLQRGDLPDHPVPKDEHYYRALTETTKRFAPPQLIRPIHFADLRYYEWNWHPNVEEPYVSNSQLKTAVQDAYHAGLLEDGRMSFGNLKNHVFMDVRHFLHRIKRGQISDPHTLWPLINMHVKPALTETDTTKIRLVFGVSKRHVLPRAMFFWPLFRYYLDNRDKSPMLWGFETILGGMMLLNSEMLLSRLYYQTFVTVDWSGFDLRSLFSIIREDIFPAWRTYFDFNNGYMPTKFYKSSTADPDQLERLWNWTNEAVFKMPFRTMDGATFLRLFRGIPSGLFETQFLDSFYNMLMILTILDAMGFDISTIYIRVQGDDSLLLLTFFLPADQHAEFKAQFEALAAYYFDHVARQDKTDISNTSQNVAVLGYSNDNGYPSRDWRKLLAQLFHPRSQRPTLSLLKARCCGIQYASMYKYPQVTNVAKATFNQLDSEGVQPVKLAAQRDVILHSHKDFYVPTDHFPTLNEVTRYLRIPYTRTEADSETYYPMSHFLSQF

SEQ ID NO: 731 - protein, 581 aa, Heterobasidion partitivirus 15
MFSLLTWLSTKFNALFDSVYSTRFEHNFRFLYKAAPLTTPHRDETKYAEYQAYVKSTLDHVLLGPDAHHIVNGYHHPIATLDAVINTFKKGDLPDHKIPKDLHYYSALLETTKRFAPPQKLRPVHFADLRFYKWNWHPNVEEPFRSEAELQQAVEAAYHAGLLPDGRMSFGNLKNVVFIRVREWLHQIKRAQITNPNTLYPLINIHVKPALTTPDETKIRVVYGVSKLHVLPEAMFFWPLFRHYLDNRKESPLLWGFETILGGMAVLHNMMTIPRLYFQTFVMVDWSGFDLRSLFEPIRTDVFPAWRTYFDFNNGYIPTRFYRTSKADPEHLKRLWEWTREACLRMPHRMMDGSVYERLFRCIPSGLFTTQFLDSFYNMLMILTILSAMGIDISTVVIRVQGDDSLIMLQFFLPANQHEEFKARFQALATYYFDHIARPEKTDISNSPEGVNVLGYTNENGYPIRDWRKLLAQLYHPRSQRPTLELLKARVCGIQYASMYRYPQVTEVCQTLWNRLEADGIKALNLAAQRDVVLHSHADFFIPTDHFPTLNEVTKWLRVPYQRTAEDREEYFPLSHFLSYF

SEQ ID NO: 732 - protein, 212 aa, Heterobasidion partitivirus 20
GRDPQEANALTDLTNSAIDHALAKFLTPEECDKIINGYRRSPWNEDALKHDISTLDSEEHHVDKDEHYWNAIKHVHKLIKPEVPLQAVHFSDLRHYKWRLSTNIGAPFASSPKWKNYVKAKFEYFRSGKQFENIADRDLFTEAHHGSQSLEITDARMTKHNLYTEAFFITRKNIHYIKEGKTSDDYGNDLKYWNTAFARQHLVETDDPDKVR

SEQ ID NO: 733 - protein, 592 aa, Heterobasidion partitivirus 20
MMNSTIVGRFPHLGTKIHGTKDINPYYCEVVDHALKRFLTPEESDKVINGFRRSPWNSAALQKDLEKLNSPEHVVIKDEHYQKALAHTAKLFAPKEKLKPVHFADLRHYPWELSTNVGAPFNSSKSWQAYLKHKLYPDNPIPPEYEEKFTDFSHKRDLFAEAHNMQTLPPTDERMTKHNLYTEIFYVNRKHIHDIKNGKTHTQSGHDYRYWHTAFARQHLVEADDEDKVRLVFGAPSLLLMAELMFLWPIQASLLSRGEDSPMLWGYETLLGGWSRLYAWAYRTIVRFASVFLLDWSGFDRYARHTVIRDIHSHVMRPMFDFSNGYWPTHKNQETTADPQRLENLWNWMTDSIVTTPLMLEDGTLIRFNHSGIFSGYFQTQILDSMYNSVMIFTILSKMGFDLDSVAVKIQGDDSLLLFLYLFIALLAQSFLSMFSHYASLYFGAVMSEKKSKLLPSLEDAEVLKYQNHSSMPYRDEITLLAMLRHPERSSSLSSLKARVIGIAYADCGQHPRVFQICEDIYNFLSQDENIKVDPHGLPGGLRFRDRYVPGEWKIDLSHFPTWFETVRHLQDPARQLLTEKHWPRKHFIGTP

SEQ ID NO: 734 - protein, 585 aa, Heterobasidion partitivirus 3
MKIFSTLYSSFASFAKWTGLTDPHGFEHNFYFTGYADKKIKVSINPRFQEVYDDYQSYVGKFIDKHLPGHMAQKIKFGYHHPVASLPFMITNLKKGDLPDHPVPHDQHYTAARKAAADAFRPPRLVRPVHFADLRYYKWNWHPNVEEPYYSDPKLQQYVEHCYALGLIDDARLSFGNLKDFVFMDTRHYLHLIKNGSITDNNQLWPIMKIHVKPALTEPTETKIRVIYGVSKRHILAQAMFFWPLFRYYIEEHTSPLLWGNETFTGGMLKIHNLISVPRLYSQTYLTVDWSGFDLRSLFTIQREIFDDWRTYFDFTAYIPTRTYPDSKTDPIRMERLWNWQRDACFKMPFVLPDRTTYARLFRSIPSGLFVTQFLDSHYNLIMIYTILSAMGFDITNLMILVQGDDSLIHLKFFLPADQHDAFKAEFERLAKYYFDHIARPEKTHVTNSPNEVEVLGYTNNNGYPSRDMTKLVAQLYHPRNVDKTSWKSLLMAKVCGFAYASCYQDSQVIDLLRSIYNNLASKGFKPKSGRVMRDIILFGESEFEVPTDHFPTLNDVTKYFRRPYVRTQRDADSYFPSWHFNDVF

SEQ ID NO: 735 - protein, 607 aa, Hygrophorus penarioides partitivirus 1
MNNLVMVIDYPYSLPTKERYNPKRKAMDMTYRNDWLRNRILKFYTEAEVEQVLTNRRSDYSDNALIADFFRADQPYHPIPIDDHVEKAVEWVTEKFRPNRVLHPVSFPDLRYYPFTLNVSAEAPWTSNNFTFRPTDRNVDAESQLPRLADIEREIMGVGNETPLTYLRKRQRAGFSKDAKLTYHNLYSQIFVYNRQRVHEIGIGAKQFWKGITPLPYYWNTIHARSHVVASDEPDKIRSVFGATKLLTQIELMFIWPLQASYMNNKDVGRMLWGREIIRGGWRKLFNEIHQTGPHNTFLSTDWSQFDGRLLHQLIRMVHRIWRRYFDFSKYEPTSYYPHSTPKNKRKLERLWKWMTEAILNTPILLPNGQLYYWKFNGFGSGFQQTQLLDSFCNAIMLLTCLSALGVNIDSPLFWARFQGDDSLTAFLERMFTIYGKHFLDQLAEAGEHYYNAKLSVKKTQISDRLTNVSVLSYFNQLGMPYRTDEDLLRHLYFPERDQDFERLAASAVGLAYANCGVSTRFHRLCEYIFNKLVHEKGFKPNYKAILWMVRSHVFPSIDDLKEAPFPTIEHLQAMVFTHTSRTQRENNRQWPNPNGKANGFWFLLNV

SEQ ID NO: 736 - protein, 568 aa, Kalajoki alphapartitivirus
MDRLTTQFQNLEINSSLTNYSFERINRFRPNVPHLNRNALEAHQRVLYNSFRRYLYPDQIDRILYDFIRHEITEDLILADFFTGNVPHFKVYKCDNYFKALDITSAAFKPPRPTRPVHIFDVQHQYPFRNRSNAEPPFSTDKYFLDKLQPNLRPSTGNMKPIIFDYTRLWHHQIKDGTEPTHRHFYYMLLHLKTALVQTSGPPKVRSIFGVPKPWIIAQIMFLWPLFAYYKKNKGSTPLLWGYETFNGGWMRLNYELFRSHARASYMMIDWKRFDKFLHFSVIDDLFVVIRRYLNFSQGYIPTSDYPDTETNWTSLKSRRLERLWQWSIDAFHQTPVVLPNGEMYSRNFAGLPSGLYATQYLDSMYNYLMIVTTLLELCVFTPNMIIKIMGDDSLAKLELFIPPSEHSNFLLDVKQTALSIFNSTISVEKSKITNCLNGVEILSYTNHNGLPHRDPISLLAQFYHTKARNPTPSKTMASAIGFAYASCGFDEQLYRVCRDIFTLYKNQGYSPDPTGLYLALGEDPFGLHLNIDLDDFPSKSYIQAKLTCLDYQTSTEWFWNTEHFLAE

SEQ ID NO: 737 - protein, 460 aa, Kuusamo alphapartitivirus
MYIKALFQLKNAINVNEKLKTVHFTGTRMYDLNKSGSAELPYTECPLFKKHVSKRFAKGEIVNEALTKGNGENFILFKERCKLHQIKDQILPKEKLLHDIRMHARSHLTTSDKEDKVRAVYGVPCTVIYAEIMIFWPLLAHLKSQENGFIAWGYETFRGGLEKLRREVHDYDIHLSLDFSTFDKLIPFWLIDDIYQIFMSLYEFGPYYEDDPDYPDPSTDPKRIKNIWEFVLFAVKHSIYRAPDGSRYSRRHSGFPSGLLQTQLLGSCCNYVMIVTALYTIGFSENDFSIKVLGDDSCISIRTQKPPKDILNEISAISKQLFNAKINVAKSTYSVGTSNLQFLSYKLNNGAVIRVNDDLLGKLVYPEKAHFTRETTKSRALGILVSNLGYNEYVHIICCEIINKLADEAYSLRGLNWYDQRKLEFIQKFIKNQPSRHELFVMALTPQPNIIDENFDKYIR

SEQ ID NO: 738 - protein, 586 aa, Medicago sativa alphapartitivirus 1
MKNIEIIGYKPSLAKPIRGNVDPNSNINYGNIVDYALRKYLTNEEFTIVTRGYRRSQWAEDSLKSDLDKLDSDYFPVLKDTHYYNAIEHTRKLFKPDSLLKPIHFSDLRHYPWQLSTNIGAPFATSKSWNEYVIQKFDEGFTKSYYRDLFREAHGESLLPEMIDRRMTKRNLYNEMFFINRTNIHLIKDGHTTNSSGHDLKYWNTAFARQHLVESHDEDKIRLVFGAPSTFLMAELTFIWPLQTSLLYQGERSPMLWGYETTTGGWSRLYKWASSRMPRYDFVATLDWKRFDRDARHTVISDIHQLVMRSYFDFNNGYHPTIHYPDSTGANPQRIENLWNWMTDATLTIPLMLPDGKILRFKHSGIYSGYFQTQILDSMYNCVMIFTVLSRMGFDLERVEIKVQGDDSIFLMCYPFITLQNTFLQMFAHYAKIYFGSTLNIDKSEILPSLENAEVLKYRNHGTMPYREELQLLAMLRHPERTVSLPSLMARSIGIAYANCGFHSRVYQICEDIYNFLKAGGYSPDPHGLPGSLRYRQNYVPGYSEVDISHFPSYFETVRLLQEPTRDLVSEKHWPLKHFIGIPGKS

SEQ ID NO: 739 - protein, 586 aa, Medicago sativa alphapartitivirus 2
MRNTTVIGHKPSLARPLYGNPDAGSNPAYADTVDHALRRYLTPEEFNRVVNGYRRSPWNEDALNDDIAKLNSDEHTVIKDEHYYKAIEHTKKLFTPKEKLRPVHFTDLRHYPWQLASNIGAPFASSKEWQHYVNDKFLKGHTATEVRDLFKEAHGQSLEPEIIDRRMTKRNLYNEMFLINRTNIHLIKDGRKTNDHGHDLRYWNTAFARQHLVEDDEPDKVRLVFGAPSTLLMAELMFIWPIQVSLLNRGPESPMLWGYETITGGWSRLHTWASTALPRFESVVTLDWSRFDKDARHTVIRDIHAMIMRPMFTFEHGYHPTYHYPDTSDTDPARLENLWNWMTDAILTTPLILPDGSVLRFNHSGIYSGYFQTQILDSIYNCVMIFTILSRMGFDLDRVEIKVQGDDSIILLMSHYTTIKDSFLPFFSLYAQQYFGSIVNTKKSEVLPSLEGAEVLKYRNFGTMPKRDELQLLAMLRHPERTSSLPSLMARAIGVAYANCGNHTRVYQICEDIHNFLAKGGFTPDPYGLPGSIRYRQNYIPSYVQVDISHFPTYFETVQHLQDPQRIILTDKHWPKDHFIGIPGKS

SEQ ID NO: 740 - protein, 460 aa, Palkane alphapartitivirus 1
MYRQALIQLKKAINVTEKLKTVHFTGTRMYDLNKSASAELPYTDDPAFKRHVLKRFQNGEIVNERLTKGNGENFILFKERGKLHQIKDKILPFEKMVHDIRMHARSHLTKVDKEDKVRAVYGVPCTVIYAEIMIFWPLMAHLKSQENSFIAWGYETFRGGLEKLRLEVHNYDVHLSLDFSTFDKLIPFWLIDDIYQIFISLYELGPYYEDDPDYPDPATNPQRIKNIWEFVLFSVKHSTYRAPDGSRYQRKHSGFPSGLLQTQLLGSCCNYVMIVTAMNILGFNESDYSIKVLGDDSCISIRTQKPPCDIINEISIISKQLFNAIINTNKSTYSVGTSNLQFLSYKMTNGAVTRVNDDLLGKLVYPEKAHFTRETTKSRALGILISNLGYNEYIHAICCDIITKLSEYAYTTRGLNWYDQKKLDFIKKYTKDLPTRHELFIMALTPLPNVTDENFDKFIR

SEQ ID NO: 741 - protein, 460 aa, Palkane alphapartitivirus 2
MYNQALLQLKKAINVTEKLKTVHFTGTRMYDLNKSGSAELPYTADPNFKKHVLKRFEKGEIVNQLLTKGNGENFILFKERGKLHQIKDQILPHEKLLHDIRMHARSHLTKVEKEDKVRAVYGVPCTVIYAEIMIFWPLLAHLKEQENSFIAWGYETFRGGLEKLRIEVHDYDLHLSLDFSTFDKLIPFWLIDDIYQIFISLYELGPYYEDDPDYPNPKTNPQRIKNIWEFVLYSVKHSTYRAPDGSRYQRKHSGFPSGLLQTQLLGSCCNYVMIVTALNILGFSENQFSIKVLGDDSCVSLRTQKPPQDIIRDISLICKQFFNAIINTDKSTFSVGTSNLQFLSYKLDKGAVIRVNDDLLGKLVYPEKAHFTRETTRSRALGILISNLGYDEHIHIVCCNIIEKLSEYAYTTKGLNWYDQQRLEILKKFTNQIPSRHDLFIMALTPLPKLTDTNFNKYLR

SEQ ID NO: 742 - protein, 586 aa, Paris alphapartitivirus
MQNIEKIANLPKLAKPILGSSDPERNPKYGQTVDHALEKFLTVDELNIVIHGYRRSQWNSTALDHDIEALNTVEHKVIKDEHYYNAIRHTYKLFKPETLLRPVHFADLRHYPWQLSTSIGAPFATSKHWIDYVNQKYDSDFKSQKYRDLFKEAHGLSLEPRMIDRRMTKRNLYNEMFYINRKNIHLIKDGWKTNSSGHDLKYWNTAFARQHLVKSNEDDKVRLVFGAPSTLLMAELMFIWPLQCSLLSRGPKSPMLWGFETTTGGWSRIYNWAHSQSPKFETVVTLDWKRFDKDARHSIINDIHSMIMRPMFDFTKGYHPTVTYPNTISTDPQRLENLWNWMTDSITSIPLMLPNGDLLAFKHSGIYSGYFQTQILDSMYNSVMIFTILSKMGFDLNNIHIKVQGDDSIFLLPHQFVMLKPSFLQFFSQYAKEYFGSTINLDKSEILPSLENAEVLKYRNKATMPYRDELQLLAMLRHPERSVSLESLMARAIGIAYSNCGNFTRVHRICEDIYNFLAGCGFTPDPHGLPRGLLFRQNYIPGYEMIDLTHFPTYFDTVRHLQDPSRELLSEKHWPRKHFIGIPGRS

SEQ ID NO: 743 - protein, 586 aa, Pear alphapartitivirus
MRNTVVVGNIPTLARPLHGNPDPGSNPAYGETVDHALRRYLSPEEFDTVVHGFRRSPWNQDALNDDIAKLNSLEHHVPKDEHYYRAIEHVRKLFSPEKKLRPVHFADLRHYPWQLSSNIGAPFASSKEWQSYVSDKFAKGHTATEVRDLFKEAHGIPLEPEVIDRRMTKRNLYNEMFLINRKNIHLIKDGRKTNDHGHDLRYWNTAFARQHLVEENDPDKVRLVFGAPSTLLMAELMFIWPLQVSLLSRGPESPMLWGYETITGGWSRLHTWANQALPRFESVVTLDWSRFDKDARHTVIQDIHTLVMRPMFDFENGYHPTKFYPETPGTNPTRLENLWNWMTNAILTTPLILPDGQVLKFVHSGIYSGYFQTQILDSMYNCVMIFTILSRMGFDIDKVAIKVQGDDSIFLLLAHYITIKDSFLPFFTTYAQHYFGSTVNIRKSEVLPSLEGAEVLKYRNHGTMPKRDELQLLAMLRHPERTSSLSSLMARAIGVAYANCGNYTRVYQICEDVYNFLAEGGFTPDPFGLPGGIRYRQNYVPSYVQIDIGQFPTYFDTVRHLQDPQRIILTDKHWPGSHFIGIPGKS

SEQ ID NO: 744 - protein, 578 aa, Rhizoctonia solani partitivirus SM03
MFNTLYESIKRFFKFSDPHDFKYNFEFLGYAPNYIKVSPFHRNEYTYQHYQNIVRKALETELYGSDVIYITQAFHHPVATMDFVIESLRKGDLPDHIIPNDEHFRNGFKYAMERFRPPYRLRPVHFTDLVRYKWNWHPNVEEPYYSNRQLERAVQTAHESGLIPDGRMSFGNLKNFVFMDTRHFLHQIKRDEVTSPSTLWPLMKIHVKSALTKTDETKVRVIYGVSKRHVLAQAMFFWPLFRYYIESDDDPLLWGFETVLGGMMKMHIAMSIPRLYWTTFVTVDWSGFDLRSLFSLQRACFDEWETWFDFDRGYIPTKWYPDTTTDPIQIKRLWNWQRDACFRMPFVMNDHSMYSRRFRSIPSGLYVTQYLDSNVNLVQIYTILDAMGFDIRQQTRVLVQGDDSVIFLVFHIPADQHVEFKSRFQALATYYFDHVARAEKNELYNEPNGVEVLGYRNYNGWPIRDWRKLLAQLYHPRGAPDEPTLMARCCGITYASMYHPQVVAVCKNIYSYLYNKGVRAAQLKQMRDVILFGEAEYQIPTDHFPLEHEVHRHLHQPYIRTQEDRDAYWPSDLFLDVC

SEQ ID NO: 745 - protein, 603 aa, Rosellinia necatrix partitivirus 2
MKNITDLPFPSKGVPQFRDALPIHGRDPEVPNPVTDASNRIIDFALRKHLTSDEFDQVVNGYRRSPWNEDALNKDIEKLDSDEHTVIKDQHYENAIQHVQKLLTPEKPLQPVHFADLRRYKWRLSTNIGAPFASSKHWQDYVKAKFNHFRDGTPFENIAHRDLFVEAHKDSQPLEITDARMTKHNLYTEAFYVSRETIHRIKDGETTDRYGNDARYWNTAFARQHLVKADEDDKVRLVFGAPFSLLCAELMFIWPLFIFLLSLKGSTAFMLWTFETIIGGWYRLVNFFTTYALRHSTVVTVDWSGFDRYARHTVIKDIHHRIIRPMFDFSHGYHPTRDYPDTSKTKDGQSNEWRITNLWNWMTDAILSTPLLLPNGRFIRFNHSGIYSGYFQTQILDSIYNLVMIFTILSRMGFDLDKCVIKVQGDDSIFMLLCCFIMISTSFFTLFKYYAEYYFGAKLNEKKSEIRPSLQDAEVLKYRNRNGIPYRDRISLLAQLRHPERRTDVDSVAARCIGIAYAACGQDATVYLICEDIYNYLVKKYDAHARQGELDFMFRHLELHDTVPSAATFPSWFDTMAHLTDGPRDPVPSHWPTDYFIGLPGRL

SEQ ID NO: 746 - protein, 592 aa, Sclerotinia sclerotiorum alphapartitivirus 1
MQNNTVIGQFKHLGAKIHGSTSINPTYLEIVDHALKRFLTPEECESVINGYRRSAWNSDALQKDIDKLNSPEHPVIKDEHYHKALAHVAKLFAPKEKLRPVHFADLRHYPWELSTNIGAPFNTSKSWQSYVKSKFEDNYILDEKYKQTFTDFKHRRDLFAEAHNMQSLNPMVDARMTKRNLYTEMFMINRDHIHRIKRGMKTTRTGHDLRYWHTAFARQHLVKADEEDKVRLVFGAPSLLLMAELMFIWPIQASLLSRGEESPMLWGFETLLGGWQRLYAWAYRALAAFMSVFLLDWSGFDRYARHTVISDIHAQIMRPMFDFENGYWPTHDYPSTTADPAQLENLWNWMTDAILTTPLMLEDGTLLRFLHSGIFSGYFQTQILDSMYNAVMICTILSKMGFDLDKVKFKVQGDDSIILMLYMLLTLIATSFLKFFSFYADQYFGAKVSESKSELLPSLENAEVLKYRNKASMPYRDELQLLAMLRFPERSSNLESLMARCIGIAYADCGNHPRVYSICEDIYKFLAAGGISPDPKGLPGGLRYRSRYVPGEYDIDLSHFPTWLETVKHLLDPARPLLTEKHWPRKHFIGTP

SEQ ID NO: 747 - protein, 592 aa, Trichoderma gamsii alphapartitivirus 1
MQNNEVIGQLKHLGAKIHGTSSINPHYARVVDHALAKFLTLEEFDIVVHKHRRSAWNSDALQKDIDKLNSTEHSVIKDEHYWKAIQHVSKLFKPKEKLKPVHFADLRHYPWELSTNIGAPFNTSKSWQSYVKQKFDKNYILDEKYKVTFTDFEHRRDLFAESHNMQSLNPMVDARMTKRNLYTEMFMINREHIHRIKRGSHTSRTGHDLRYWHTAFARQHLVKDEEPDKVRLVFGAPSLLLMAELMFIWPIQASLLSRGEESPMLWGFETLLGGWQRIYSWAHRLMLSFSSVALLDWSGFDRYARHTVINDIHTHIMRPMFTFEDGYWPTHDYPDTTADPQHLENLWKWMNNAILSTPLMLEDGTLLRFRHSGIYSGYFQTQIIDSIYNSVMISTILSKMGFDLNKVHMKVQGDDSLILFVYMFLSLIAMSFLKTFSYFAQLYFGAVLSEKKSELLPSLENAEVLKYRNRNAMPYRNELELLAMLRHPERTSSYESLMARAIGIAYADCGSHPRVYSICEDIYKYLAALGITPDPKGLPGGQRFRSRYVPGEWDIDLSHFPTWYETVRHLCDPARPLLTEKHWPRKHFIGTP

SEQ ID NO: 748 - protein, 595 aa, Tulasnella partitivirus 1
MLNLKFLGSFPALALPIHGRDPTESNTRTETSNRIIDFALKKYLEPEEADTVINGYRRSPWNEDALNHDIQKLNSEEHSVTKDEHYWNAINHVAKLIKPEVPLHPVHFADLRRYSWRLSTNIGAPFAQSKWWQNYVKAKYNYFAHGTPFTFEHQRDLFVEAHRQSQPLEITDARMTKHNLYTEAFYITRKNIHEIKLGHKTNSKGHDLRYWNTAFARQHLVKTEDPDKVRLVFGAPFTLLTAELMFIWTLQVHLLQMKGSRSFMLWGFETILGGWYRLRNFFARYAPRHTLVATLDWRGFDKDARHTVIKDIHTHVLRPCYDFSTYHPTKDYPTYSSEPGELPIEERITNLWNWMTDTVLTIPLMLPNGDLVRFTHSGIFSGYFQTQILDSLYNMVMIFTILSRMGFDLNKVVLKVQGDDSIIMLLCVFILVCTSFLSLFKHYALFYFGSTLNETKSEIRDSLQDAEVLKYRNKNGIPYRDELSLLAQLRHPERSTDADAVAARCIGIAYASCGQLPRTYKICEDIHNYLVKHYDAKPRQAELDFYFRHLDVAGVNIEARFPSFLETVNHLMDNEQPLAAHHWPKDYFIGLPGRR

SEQ ID NO: 749 - protein, 586 aa, Tulasnella partitivirus 2
MQNLRILGYQPRFLTPNASFAPSQQISFSPRQEEHHRKIVRRALRKYGSKELIDETIHGYRRSAGDDIAAEKDFLKTDQPYVDLKRDFHYKRALRLTEKLFRPSRQLRPISFPDLRFYPWNLSTSAEAPFTIKKRWYEHVRTKQAGGDVENSRMSFHNLYNEIFHENRRRIHMIKDLDRQFWEEDGTPKPYYWAELHTRAHLVKAEKEDKNRAVFGVPKLLLMAENMFIWPLMSEYLNMRVDAPLLWGFETIRGGWKKLRRDIRSKSRGANTFISADWSGFDHKALHAIIDDVHHMWRSWFTFDDGYQPTNVYPDSSTGGYSSDRIDNLWNWMTWNIKHIRIRGASDALYQWQFNGIASGYQQTQLLDSFVNCIMLLTVLSEAGIDIDSPEFYIRVQGDDSIICFRERKFHLEGKHFLAKISMMAKERFNADLSPDKTTYGDNLNDLEVLSYKNRNGIAYREEAELLAHLLYPERPRAYEALAAASVGIAMASMGCSRSVYLICRDIHMHLTSYHRFDQSKYDRHYIFKGMKIPIPNDLGFPSFDELFSQNFDLRERTEAEKQHLWPTRDNGVRTEQFPDGFYFLE

SEQ ID NO: 750 - protein, 619 aa, Tulasnella partitivirus 3
MDYLTHAFSRITSWFKKPTNLEYVGVYEHDPPRTAYTNLTALDNHQATIMHSMRNFFTDEEIHRITHDYRRSEITMEAILADFFANDVEQHDIPWDQNTENGLACMAEAFRPPRPCLPAHIQDVEHHYPYKWQVNSEPPFSTDAYFKENLPTFGEFIDSHGYDHIDKEDFLRRHQDLDNPSFRNQVTPPKFGFQKTQIFNWTRRWHHIIKDGFTNTTGLINDYYLQHRYIFPMLLHTKTAIVKKDDPNKMRTIWGCSKPWIIADTMFYWEYIAWAKLNRGATPLLWGYETFTGGWFRLNAELFNGYMKASLITLDWSRFDKRAYFSLILRIMYIARTFLDFNRGYLPNVSYPEHKNWNADKATRLQRLWEWTLENLFKAAIVLPNGDMYQRRFAGIPSGLFITQLLDSWYNYTMLATLLSALGLDPRTCIIKVQGDDSIIRLAVLIPPNEHTHFLTRLTELAEYYFKAVIAAKKSEMSNQLNNREVLSYRHINGIPYRDEFKMLAQFYHTKARDPTPSITMAQCIGFAYASCGNHSRVLQFLEDVYLYYAKQGYTPNRAGLTAIFGNSPDMIDFPFALDHFPTKKEIRQYFVSTDYKNEISNAKTWPMTYFTYPPCHLF

SEQ ID NO: 751 - protein, 616 aa, Vicia cryptic virus; identical to SEQ ID NO: 593

SEQ ID NO: 752 - protein, 616 aa, White clover cryptic virus 1; identical to SEQ ID NO: 592

SEQ ID NO: 753 - protein, 755 aa, Betapartitivirus sp.
MALTIFMIVTLNILLRFQHRRRNSRTLKDLSFPIRNILFEWETRRSIPRSQPDSATIFDYSKSLLAYIDLHTCYLLSHNLDQEMESIRERYSQREQNFDLHQHYDVTDLPEDRYPAPGIRFAERIYHDIPSAVLNRDDIQIPISNDPSFIETPDARSGILYAESLDLSGAPPIPEIAQIIHDWFPHYEVYLTEYCRPPSYGPQAFLDFNRPTPSPAPPTPERHEAIMRVVRAKLAIKPYRPLHFADALAAETPLNTSASYFSKFDPRTRVYARYSAPKRYADRPTSKGYFINVMLNQFRREMHNVKDDGLPFPTGDFDPEIEADKLQYFFKNHPSQLFIRTQISKRDPSEPKKIRPVYSVDDRFLHIEKMLVTPALAQMRNPQCCIAHGLETFRGSMRLLDIVALSFFVFISLDWSQFDQRLPYYVIIAFFLDYIPSLLIVSHGYMPTRTYPDTTQPTPLFSRKMFNIVVFLLSWYLSMTFLSYDGFAYIREHGGVPSGLLNTQFLDSFGNMYIIVDCLLEYGFSESDCLEMLFCVLGDDNLIFLRQNFSRVHGFMEFLDRYAKQRHGMVLSILKSVYTTLRSKITFLSYENFYGMPTRPIGKLVSQLAMPERPIPDSKSWIHAARALGLAYANCGQDHTFHLLCEKVYQKFRPTTPVPTHHVQKIFRKWKHELPEFDIESVEYTFPEFPTLHEIRQLVHEYHGPFSEMDKWNTDVFNAPPSDNLPDFTTLKDFMNQDSEMSRTAAEFWHGKRSI

SEQ ID NO: 754 - protein, 745 aa, Cannabis cryptic virus
MPYNAVRNYLAERMIRTKREWQLYQSSNRDPESTLEHYQDSDYLRYYQNARFNLNQEERFRALNKEYSTLVEAFRTDNLRKHQPYELHQPIPPDAAPIPDKRQPAPGIKLVPLMYHYGHVVHDTPSTTDDHTSNDDSQSAPSRLLKTTEFGYSIDKQIYDLVCRRYPTYLSVINLYCRPLGTVDATFSDFNKEQIPSNPIDPDRKEHVLKHIFKFLDATPYLPVHFVDTQFCKTPLVTGTGYHNRYSFKQKAHAKYSHPEEYATYPSSKGYFYNATYENARTLVHYIKQNGLPFEFDFNLSEESLTDEQIDLFVNRSNAFFNDYPTLLFTRNHISKRTGPLKVRPVYAVDDIFIIIELMLTFPLTGQARKPSCWIRMARNHSGSNRYIDRLGRSYSTFFFINWASYDQPMPRVITDIYYTDFLRSLIVINHGYQPTYEYSFYPDLDEHKLYDRKNNLLFFLHTWYNNMTFLLPDGFAYRRSYCGVPSGLYNTQYLDSFGNLFLIIDAMIEFGFTDSEIDGFVLLILGDDNTGMTQMHIHRISQFINFLEKYALERYNMVLSATKSVLTTLRSKIETLGYQCNYGSPKRDIDKLVAQLCFPENGLKPHTMSARAVGIAYAAAGQDYVFHSFCQDVYNMFRSYYKPDARANLFFQRQVLQNLEDGIPDLATPVVPPFPSLFEVREMYSEYKGPLSFEPKWNKAHFINDPNDIPPFSKTMRDYEKEHNLPVRVSPTFETVVPSTKNLP

SEQ ID NO: 755 - protein, 663 aa, Ceratocystis resinifera virus 1
MPSFSANPTYQTLIDDIDFDVPIAHPFSVINTDLQPVDDEETVHDLGSKDFEFYKVVSDNLPPTRAPSIGIESLPNIRYHNHSNDHRYRDQPPTGPPPMRGVRKIINDSFPQYLPYLKEWCRPKTSSDAIFEDFNQPQIPSIPLSYNRKQRILNLVNHFMGVKPYDIVHFCDTRFYPWDLSKKADYFHNHSNARKRHAQTSHASTATGPTKKSWFINAHLFHDRSTVHNIKLYGLPFKPHSYEARNKILLELWFKKIPTELLVRSHISNPKKLKVRPVNNAPMIFLRIECMLFYPLLAQLRKQQCSIMYGLETIRGGMMEIESLATRFSNFMMIDWSKFDQTVPFTLVDMFYQDWIPTLILVDSGYAKIHNYNDHVHSFAAQARKLGVHGDSNLNEAPPEAAVFANKVENLLKFINTWFKEMVYITPDGFAYSRTFAGVPSGILCTQLIDSFVNLVVLIDSLFEFGFHESDIKSALILLMGDDNVVFAPDKLSQLHSFFKFLPDYAKKRWNMKVNVDKSIFTTLRRKIEILGYTNNYGMPVRSLSKLIGQLAYPERHVNDSDMCMRAIGFAWCAAASDSTFHDFCRKVFIYYYARVNVPIKDLVQSNASALPGMFFAYRDVHQHIKLDHFPSIEEVRQVLSKHHGYLTEEPLWKYDFFLHPKP

SEQ ID NO: 756 - protein, 746 aa, Crimson clover cryptic virus 2
MPFNAVRNYLNERMTRLKQEWKTYQSTDHDPIKILDTIQDPDYRRYLDNARFNSDNEMKHLMLNKEYSTLVEAYRTDNAKKHQVYELHQPIPNDAAPVIQSRLPAKGIKLVPLMYHYGHVTHDPVSLTDANRSDDFETQVVPDSDAPTRFGYPIDVRIYNLICYRYSKYLEVINAYCRPIGTVNATFEDFNKEQIPSAPIDPKRKENVLSHIHKFLDTKPYLPLHFVDTQFCKTPLVTGTGYHNRYSFKQKAHAKYSHPAEYATKPISKGYFYNATYENARTIIHFIKEYGLPFNVIRADDKSELTDSDVQKYINEANSFFNDYPTLLFTRNHISKRDGPLKVRPVYAVDDIFIIMELMLTFPLTIQARKPSCCIMYGLETIRGSNRYIEQIARDYSTFFSLDWSSYDQRLPRVITDIYYTDFLRSLLVINNGYQPTYEYPTYPDLDEHKLYHRMDNLLHFLHLWYNNMTFLLPDGYAYRRTSCGVPSGLYNTQYLDSFGNLFLIIDAMLEFGFTDSEIQKFILLVLGDDNTGMTTIPICRMFNFITFLEKYALERYNMVLSTTKSVLTTFRSKIESLGYQCNHGSPKRDIDKLVAQLCYPENGLKPHTMAARAIGIAYASAGQDDMFHSFCQDVYNIFRSDYRPDDRMNLHFKRQIFHNLEDGMPDLAPPIVPPFPSLYEIREMYAYYKGPLDFAPKWNYAHFMSDPDTTPPYSKTMRDYEAENNISSRVAPTFETVVPSTINLP

SEQ ID NO: 757 - protein, 745 aa, Dill cryptic virus 2
MPFNSVRNYLAERLIRLKREWMTFQSSDRDPELTLEISQDPDFRRYYANARFNLNNEAKQLALNKEYSTLVEAYRTDNDQKHQPYELHQPVPLDAAPVPDNRQPAPGIKFVPLMYHYGHVIRDPSALDDSSQLSNDETLSMTEPSATEYGYPIDIRIYQIIVQRYPEYLAVIHEYCRPIGTVNATFQDFNKEQTPSAPIDLTRKEAVLEHIFRFLDVKPYLPVHFVDTQFCKTPLVTGTGYHNRYSFKQKAHAKYSHPDEYALNPTSKGYFYNATYENARTLVHYIKQYGLPFKLEFDHSDSDLTDEQIQFYIDKANDFFNDYPTLLFTRNHISKRDGTLKVRPVYAVDDLFIIIELMLTFPLTVQARKASCCIMYGLETIRGSNHYIDRLARSYSTFFSLDWSSYDQRLPRVITDIYYTDFLRRLIVINNGYQPTYEYPVYPDLDDHKMYDRMNNLLYFLHTWYNNMTFLLPDGYAYRRTHCGVPSGLYNTQYLDSFGNLFLIIDAMMEFGFFDSEIESFILLILGDDNTGMTTISIDRISLFINFLEIYAKERYNMVLSSTKSVLTALRSKIETLGYQCNYGSPKRDIKKLVAQLCYPENGLKPHTMSARAIGIAYAAAGQDFMFHSFCQDVYNMFISDYRPDARMNLYFQRQIFHNLEDGLPDLSTSTVPRFPSLFEIREAYSRYQGPLTFTPKWNIAHFINDPDYTPPNSKTMADYEYDNRITFKVAPTFETVVPSTKSFP

SEQ ID NO: 758 - protein, 706 aa, Enontekio betapartitivirus 1
MAFNSVRNYLLEQRTRQLHETREFQKNDRNKQLILQRNPDSDLRRMYDSQRDRLTEEQKKYALQSEYDKILQSFHLKNLDKKEPFQYFDATPFPGYPPNRLPAPGIIPVYHKFHTGQTVTITDFISETGERLHPILETLIQTKYPQYMKYVDKYCRPLGSTDATFADFNREQVKSKPIPYERQRKIISHATRILDISPYLPVHFVDTSYAKLPLNTGTGYHNRHSFKINAHAKFSAPDEYRPRPTSKGYYVNAFLESARTLVHYIKQYGMPFETTETPTNEDIIQYALRMNKFFLEYPTLLFTRSHISDRDMNLKCRPVYAVDDLFLKIEAMLTFPLHIMARSYDSAIMYGLETIRGGLHHLDHLAKAYKSYASLDWSQFDQRAPFCLVTLFFQTIRENIIVSNGYHPTYEYPSYPDLNTEKMALRLNNLTTFLEQWYYNMTFVTADGYAYKRSVAGVPSGLLNTQFLDSFINISSIIDAMLEYGFSDHQIESFRFFIMGDDNTFFCDLPINELNMFVTWFANYALERYNMKLNAEKSTVTCLRNHISVLSYTSNFGMPIRPIGKLVAQLCYPEHGTNLKYMSARAIGIAYAACAMDFMFHSFCKDVYYSFLPYAAEYTKADIENILKHLPGQFKMLDAYVETINLNYFPGFHEIRALVQQWQGPLSEYPKWDSAHFINEARHKPEQFETLHQYNTRFKTIQFPEN

SEQ ID NO: 759 - protein, 350 aa, Enontekio betapartitivirus 2
MSFTNPRDEFFTVNPKWKFPENRKPSNGIIGFPTLRYHQNNAFMQSNRDQPSTGPPPMKGVEKIIRERFCQYLNSLDDYCRPKSDVDAIFSDFNKPARQMHNLSTKHVDEVISIVDSFFSIEPYDIVHWCDTRFYHWTLSSKTDYFHIHSHQRKREAKLSHLIDSSGPTKKSWFINTHLFHDRAVCHNIKEYGYPFIPTDDAKRNENQLQHWFQKHPTELLIRSHISKHDKLKVRPVYNAPFLLIRLEVMLFWPLLAQCRKPENCIMYGLETIRGGMHKIDEVAKDYNSYIMLDWSSFDQSAPFKIIDYFFEKWIPTKLLVDSGYAKIHNYRDHVANFQQQAKAPQTHPT

SEQ ID NO: 760 - protein, 709 aa, Erysiphe necator associated betapartitivirus 1
MVLSPIRDYLHEAQLRIKQEWQNFQKSEYTSGYSEKYSTDHDLRRYYDSARNYDAEHHKTDEYEHNFAQTFERYTHANANRNEPFEFYRPFLPDEPPPNRVPQPGLTILPYRYHTGQIVHITDEIPESGFSLHPHIQYLLDRKYSHYKQYTNKYCRPLGTTDATFHDFNREQVETQPISLERKQLVLPLVNHFLNALPYLPVHFVDTRFCNTPRSTGTGYFQRFSTFFRTHAYYAHNKIYRLRPTSKGYFFNTVYEFSRTWMHHIKEHGFPFVPSDDYSDNIKNLRIFFQKHVTMLFTRNHISDRDGALKQRPVYAADDFFILCELMLTFPLHVMARYPINGIKSAIMYSFETIRGSNHYLDSLAKSFQSFFTIDWSSFDQRLPRVITDLFFTDFLPGLIVINHGYQPTYEYPTYPDLTEHDMYHRMSNLLHFIHTWYNNMVFVTADGFAYLRLTAGVPSGILNTQYIDSWSNMFLLVDGLIEYGFTKSKILDIVFFVLGDDNSGFTQLSHHELSEFLEFFETYALRRFNMVLSKTKSVITIMRNKIETLSYQCNFGKPRRPLGKLVAQLCYPEHGPKDKYMSSRAIGIAYAAAGMDPEFHEFCHDVYNIFLPYAAPINDHTINMALKHLPGYFKILDSLATEISLEHFPSIEEVLNKYSKWQGYLTAEPKWNSSHFKYLPETVPNNYKTMTQYELEHNLQRPKVTYVF

SEQ ID NO: 761 - protein, 701 aa, Erysiphe necator associated betapartitivirus 2
MLTQIRDYFHERLTRLLYDHKIFSQQSEDPDQALHRHQDSDIERIYKSIHYDFARSTAPTDYEAQYQSIKHILEEKQAKQGFDSEFYRPRTDPVPDNRVPPTGIDPLPFEFKSMNVVTASTEVPESGFQIHPRIERLLRAKYPQYMPFVRKYTRPLGTTDATVSDFFKPQTPSPPVENSRIQHVMTHVMKKLAITPFLPIHFVDTQYDKRPLHTGTGYYNRRSHEANVHAIFSHPKEYEAKRTSKGYFINAFLESARSLVHWIKSTATPFRHAPSDLASSLRTFFLQRPTMLFTRNHISDRDGHLKQRPVYAVDDLFLTIESMLTFPAHVIARKLECCIMYGFETIRGSNQILDYMAQSYKSFFTIDWSGFDQRLPWCIVTLFFTELLPRLLVVNHGYAPTYEYPSYPDLTTEKMVSRLTNLLTFLATWYFNMVYITADGFPYVRRFAGVPSGLLNTQFLDSFGNLFLIIDGLIEFGFSDAEIDDLLLFIMGDDNSGFTLWSITRLETFLSWFELYALNRYGMVLSKTKSVITVLRNKIETLSYTCNFGQPTRPIGKLVAQLCYPERGPRPKYMSARAVGMAWASCAQDKTFHDFCRDVYYEFLDEREEIDESAYLHIQSHLPGFLRIDESVRQVINFQVFPSLLTVSQAIKQWKGPLSYQPKWDLAHFVNQPDVIPPDSITLYEVWSERKFDLPILRNLF

SEQ ID NO: 762 - protein, 621 aa, Heterobasidion partitivirus 17
MEYLTSLLSRAFSALSVTTNFQNVGYSEHKPSIPDVNSVAIENHQRTLRYVFRSYLSSDEYDAITNGYKRTSLDPETITEDFFSGDIPDHPEPQDPQAQLAIQGALLDMYDAFKPPQPAMPCHLYDIQWHYPFKWQVNAEYPFSVVKKFLNLRQHFGDFYDFATKSWLRYVNPADALRRFGPDPSPALLETVVPAKFGYMKNLIFSFVHSWQHIIKSRFTSTAGLRDKEYINLRFLFPMLLHIKTAVVKFDAPNKLRSIWGVSKLWIISEAMLYWEYIAWIKLNPGITPMLWGYETFTGGWFRLYRDLHQPGESVSYITIDWSRFDKRARFWLIKKIFAVVRTFLTFNNGYVPTRDYPSSPTLPDKLQALWEWTIEAFFESPIILPDGSIWKRIFAGIPSGLFITQLMDSWVNYVMICAILRYLGYDPRQCIIKVQGDDSIIRLYFQIPYHEHNNFLLRMQQAAEYLFGTIISFEKSEIRNSLNGCEVLSYRNIEGLPYRDLIKMLAQFYHTKAKDPTPAITMAQAIGFAYAAVGNEYRIHKLLEDVYQYYKDQGYEPNPAGINIVFGDSPDRPYYPIELDHFPSQQEVQRFLLATDYQDAFTDERTWPRSHFLFAPCSRT

SEQ ID NO: 763 - protein, 722 aa, Heterobasidion partitivirus 2
MSTNPPEVLLPLPEVDPNANNVRYAKLLDQYRANPSNSNQKLLLEYAEQHGFNYFIPTDVPLPDDRKSAPGILSLDGFRFHTVAAFHRYQKMSRYGYNALGFIFKLILTLFNPFLWILTDYCRPSGSADAVFENFNQEVSPVEHVNPSRLAQIMPLIHHFFAIKPFCPIAFPDLRFYKWSLVTSADYHAHHSKDQQDESAHYWKHLKDSDLLQDRFDYSDRPRSKGYFFNTVLLSTRTIVHNIKYHCLPFQRHKRDTDSSVLQKLSFWFMKYPTVMYVRSQISKLSKLKVRPVYNAPFLFILIEAMLTLALMAQCRLPDSCLMWGFETVRGGMQELNRISYNYDTFIMIDWSRYDQLLPFAIIYHFWCTFLPQLIRVDLGYMPTEQYTATQHKHAFTEKHNDQKESNPEYATFASRLKTHAPHIVMFSFIIFNLLAFIWLWYVKMVFVTPDGFGYVRLLAGVPSGIFMTQICDSFCNAFLLIDAMLEFGFTPDDIKLIRMFIQGDDNVIFYLGDFTRIFAFYEWLPEYCQQRWHMTISVDKSSITRLRNKIEVLGYTNLNGMPHRDCAKLIATLAYPERYVQDKTKYIVFMSRAIGIAYANAGHDRQVHDLCQRAYLQARKDSGLSYDELKNIKIEYQKLGFYEIFSVNIEELREHLIQDVSEFPNFHDIRDNLRHWHGPHTVYPMWPRHFDDDLSSIKSPHSLTTLYDVMQSGGLTFDYNF

SEQ ID NO: 764 - protein, 724 aa, Heterobasidion partitivirus 7
MSTNPPIVEQLANPPQPEDKHVQYAKLLDIYRANPSYYNQQQLKEYTELYGFNYFVPVPETDFPPERKPSNGLFALENFRFHVLPSFTRFRDIPRTGYNPLSFITYILYRMFPQLLNILDDYCRPAGNIDAIFENFNQEVTPVEDCDPARLIQIMTLIHFFMQIIPFSPIAFPDLRFYKWSLTTSADYHCHHSQDMKRESKSYWQYLKDHLMLEERFDYSERPRSKGFFFNSVLLASRTIIHNIKYYGTPFKPTKGQDEPSRLSKLAYWFMKYPTVLYVRSQISKISKLKIRPVYNAPFLFILLEAMVTLPLMAMCRLPGNCILWGFETIRGGMQELNRLSFDFTTFIMIDWSRFDQLAPFAIIYHFWCTFLPQLIRVDRGYMPQGEYTTSRHKSAFTAKHDNHFEHNPKYHSFATRLLTKYPPHVIMFTFVIFNILSFIWLWYAKMVFVTPDGYGFIRLLAGVPSGIFMTQILDSFVNLFLFIDGLLEFGFSLDEIRLIRLFIQGDDNIAFFIGDFERIFAFYEWFPAYALKRWHMIISVDKSSITRLRKKIEVLGYTNNNGMPSRDLKKLVATLAYPERYVTGPQWSVIQMSRAIGIAYANAAHDSSVHDLCRRAYNDARKHSGLTHDELKNIKIEYQKLGFYEIFSVNLEELQSILVQDLSQFPDYYDIRSNLRYWHGPHSVYPMWPSHFDDPLSSIQEPDDLITLHTVLSHAGVTFDRNY

SEQ ID NO: 765 - protein, 704 aa, Heterobasidion partitivirus 8
MLSKVRDFFHEKLSRLLLQHSIFQSNDKDEEQTLLENQSSDVKRIYNSIHYSFQTDDTQAAYEDQYQHIKHVLEDKDRLSNFPAEFYLPYDTTTTPDNRVPPSGIDQLPYVYKRTNVVTATDEVPETGYPIQNRLLRLIRSRYPQYLPHVRTFTRPLGTTDATVSDFFKPQHPSRLVDPSRISHVMKHVMNKMAITPYLPIHFVDTQYDKRPLSTGTGYYNRRSHEANIHALYSHPKEYENKRTSKGYYINAFLESARSLVHWIKSYGNPFRSKPADPRESLKKFFLQRPTMLFTRNHISKILGALKQRPVYAVDDLFLTLESMVTFPAHTIARKIECCIMYGYETIRGSNVQLDRLAQRYNSFFTIDWSGFDQRLPWVIVLLFFTEFLPRLLVINHGYAPTYDFPSYPDLTTEMMYQRLSNILSFLATWYFNMVFITADGFAYVRRFAGVPSGLLNTQFLDSFGNLFLIIDALIEFGAQDEEIDSILLLIMGDDNSGFTIWSIARLEQFITFLESYALTRYGMVMSKTKSLVTVLRHKIQTLSYTCNFGRPLRPIPELVAHLVFPEREFKPQFMSARAVGMAWASCAQDKTFHDFCRDVFYEYLEESVPVDNTNIAWIQSHLPGYLRVDPEVTKMIDLNVFPSFLHVSQKLSRWQGPLSYQPKWDLAHFINQPDVIPDDSITMFEYMQEHSLSLDIQFDLFSA

SEQ ID NO: 766 - protein, 734 aa, Heterobasidion partitivirus P
MPHYQIPPYDIPPVVSDVNFDTESFQPHEKYRELLETYRLSSTDGNLKAIQDFVSEYDFQYFMPTGIETLPDNRVPAPGIRALPQFRFHPVAALNRFRSIPRTGFNALWTIVNLLATSFMSYVYVISDYCRPAGNIDAIFENFNQAVSPVKDVTSQRLNEIMILIFHFLPIVPHPPVNFPDLRFYKWSLVTSADYHAHHSSDMQNESTRYWTHLRDTSQLEDRFDYSKNPRSKGFFFNSLLLRCRRIVHNIKYTGWPIPHDPSESKTSFLQRMLYWTLMNPTVMYVRSQISKITKLKVRPVYNAPMLFLMLEAMLTLGLMAQCRKPDNCILWSYETIRGGMHELHRISTEFNVFMGFDYSRFDQLAPFTIIYHFWATFIPMIIRVDRGYQQSTIYTKDQYAYDFEKKYDNLDKSEPKFQEFAKKSNNLFPKHVVAFSFVIFNILSFIWWWYVFMVFITPDGYGYVRLLAGVPSGIFMTQILDSFVNLFIFVDALLEFGFSIDQIKCFRLFIQGDDNLVFYLGDLTRIFDFYEWYPEYALDRWHMIVSPDKSWITRLRTKIEVLGYTNANGMPHRDVSKLIATLAYPERTILDKNRYPILMSRAIGIAYANAGHDHAVHQLCYHAYLDARKKSNLSASELKEIIIPYQKLGFYEIFSVNIEELFPTLVRNLDRFPTFYEIRDNLSKWHGPHDIYPMWPLQFTDRPDFINPDETPITLYDFMTKINLHIPLHHDVL

SEQ ID NO: 767 - protein, 367 aa, Heterobasidion partitivirus P
FPMLLHIKTAVVKFDAPNKLRTIWGVSKLWIISEAQIYWEYIAWIKLNPGITPMLWGYETFTGGWFRLYRTLHTPGENVTYITIDWSRFDKRAYFWLIRKIFIRTRQFFDFENGYTPTKDYPFSPTHPDKLQALWEWTIEAFFDSPIVLPNGHVYKRRFAGIPSGLFITQLMDSWYNYVMLCSILHYMDIDPKTCIIKVQGDDSIIRLAILIPKDEHDNFLATMQTVADHLFGAIISMDKSELRNSIENCEVLSYRHFMGLPYRDLLKMLAQFYHTKARDPTPEITMAQAVGFAYAACGNDYRIHALLEDIYMFYKLQGYEPNPAGMSLVFGNSPDRPELPFNFDHFPSQNEVQQYFVSLDYKNEQQ

SEQ ID NO: 768 - protein, 746 aa, Hop trefoil cryptic virus 2; identical to SEQ ID NO: 704

SEQ ID NO: 769 - protein, 628 aa, Kalajoki betapartitivirus
MSSNSNEFYRIVKNPSIPPNRRPARGIRILKDIRFHENERILNSNPELSKYGPPPMKGVERVLKEEFPTLHHYLQEYCRPKADADPIFEDFNLPQDKTKKIESDRLHQIFDIIENFVPIRPYDIVHWCDTRFYPFNLASKVDYYHIHNSKRKHEADLNHPADASSRTKKHWFVNTHLFHDRHICHNIKLYGYPFIPSRVEKINEQKLFDWFKKHPTEMLVRSHISKLDKLKVRPVYNAPFLFIRLEVMLVWPLLAQLRQEQCQILYGYETIRGGMIELNRIATNFQSYLCIDWSRFDHNAPFNIVDVLFDYYLPSKICTDFGYAKTYNYQQHAFHQAKHTTVDPNYNSSNSSKFVDVFPAKVKNLLTFLKKWYKEMIYITPDGFGYQRTTQGVPSGILCTQFFDSMINYIVVIDSMLEFGFTPVEIKTFKMFVLGDDNIIMFPFEYHKAQQFFDFLISYSKDRWKMIINAEKSKCTNLRRDIEVLGYTNNQGLPTRDIGKLVAQLAYPERHCDYNAMITRSIGMCYASAASLPLFHDLCLSVYKHYLNKIGNEPYTPVIKGLPGQLQHMLGLDEVPLDHFPTITEIYNRVSSWKGPLNLIPYWNPQYFLEPPWVIREQYQTLLRTHDS

SEQ ID NO: 770 - protein, 715 aa, Lentinula edodes partitivirus 1
MVFQQIRDFLSERKLRIQEEWRRYQKAVSRDDTELRQSDASDIRRMYEATRDQLTEQEKAAVLDREFQGLIDSMLLKNENKKENFEFSSTSAFDGFPPNRVPISGIAGIPRRFHTGQIVSESNEVPESGYPLDTLIDTLITNKYPEYRYYVDKYTRPLGTTDATFKDFNKEQVLIEPLDPARKERVMMHVHERLATTPYLPIHFVDTQFCKLPLHTGTGYFQRHSFWTQTHSKYSRPEEYHDRPTSKGYVMNAFLILARTAVHKIKVSGLPFDFDFDDFEDDNAAFNELAKYLDKFLNDHATMLFTRNHISQRDGKLKQRPVYAVDDLFILIEAMLTFPLLVLARDPACCIMYGLETIRGSMIYIDQISRMFNSFATIDWSEYDQHVPRPITDVYYYEFLPDLIVINHGYQPTYEYPTYPDLDEHAMYKRIDNLLFFLHFWYNNMTFVTADGYGYRRKHCGVPSGLFNTQYLDSFGNTYLIIDGLCEFGCSDEEIRLFLIFVMGDDNSLMSYWTLERLIAFIQFFEAYAKMRYNMTLSRTKSTLTAVRSKIEMLGYQCNFGRPSRPIGKLVAQLCYPERGLFRKFMSYRAIGVAYASAGIDVKFYKFCKDIYFTYLPYAVAASEFNFLRAATHLPGYLKAFDDVSDYINFEKFPTIYEIREVYSYYHGPLSYEPKWNRAHFINRPNIVPPSAKTVGDYRRENNLQPRQVPILPTD

SEQ ID NO: 771 - protein, 255 aa, Plantago betapartitivirus
IELMLTFPLTVQARKPSCCIMYGLETIRGSNHYIDRLARSYSTYFSLDWSSYDQRLPRVITDIFYSDFLRRLIVIDQGYQPTYEYPIYPDLDEHKMFRRMDNLLFFLHTWYNNMTFLLPDGYAYRRTSCGVPSGLYNTQYLDSFGNLFLIIDAMFEFGFNNVEINGFILLILGDDNTGMTIIPIDRIADFINFLERYALERYNMVLSSTKSVLTCLRSKIQTLGYQCNFGNPKRDIEKLVAQLCYPENGLKPHTV

SEQ ID NO: 772 - protein, 730 aa, Quinoa-associated betapartitivirus 1
MPFNPVRNYLAERLARLKEEWKIFESSHRDPDLTLEKIQDPDVRRHYYHVKTNQEIELKTKMFNQEYSTLVETYRHQNDERHQPYELHQPIPADAAPIPQSRQPAPGIKFVPLMYHYGRVILPNPDTSIERDSLSTTGDIDSGDPMDPTIYNLLVNRYPEYLSIVDKYCRPAGTTDATFRDFNKEQIPVDPIDPKRKETILTLVKHFLDVTPYQPVHFVDTQYCKTPLTTGTGYHNRYSFKQKAHAKYSHPPEYANRPTSKGYFYNATYENARTLVHKIKDTGFPFNLSSNATEHEIIDRLNNFFNDYPTLLFTRNHISQRDGVLKVRPVYAVDDLFLLIELMLTFPLTIQARKPSCCIMYGLETVRGSNHYIDFIAQKYTTYFSIDWSNYDQRLPRVITDIYYTDFLRSLIVINQGYQATYEYPEYPDLDEHKLYKRMDNLLHFLHLWYNNMTFLSMDGYAYRRTYCGVPSGLYNTQYLDSFGNLFIMVDAMLEFGFPPSKIKEFLFLILGDDNTAMTMMDIQHVDPFIKYLEKYALKRYNMVLSLSKSLLTTLRSKIETLGYQCNYGSPKRDVYKLAAQLCYPELGIKPHTMAARAIGIAYASAGQDATFHSLCQDIYNIYRSAHRPDPRTTLYLHRNVFHNLEEGLPDLESSEAPLFPSLYEIRQHYSHYQGPLTYSPKWNYAHFIHDPDFVEPLPKTMAQYEKENHISSRTAPTFPTVVPSTIMFP

SEQ ID NO: 773 - protein, 742 aa, Quinoa-associated betapartitivirus 2
MPFSSARDYLAERMIRVKHEMQLFQAAQSDSQVILETTQDPDFRRYYDTVRYNPEYEYRFRILNKEYSTLVEAYRADNAHKHQPYELHQRIPLNAAPTPSSRLPANGIRLIPLMYHYGHVIRDPIDTLLSDSFTLSPDTDETCDNAILRFGYPVDDRIYRLIARRYPKYLTVISTYCRPLGTVEATFSDFNKEQTPSDPINHERKEHVLKHVFKFLDAKPYLPLHFVDTQHCKTPLVTGTGYHNRYSFKQKAHAKYSHPKQYSELPSSKGYFYNATYENARTLVHMIKKHGLPSSLPFDPLKDNLTEDQNQLYIDKLNDFFNDYPTLLFTRNHISRRDGVLKVRPVYAVDDIFIIIELMLTFPLTVQARKASCCIMYGLETIRGSNHYIERLARSYSTFFSLDWSSYDQRLPRVITDIFYTDFLRSLIVINHGYQPTYEYPVYPDLDEHSLYSRMDNLLHFLHLWYNNMTFVLPDGFAYRRTYCGVPSGLYNTQYLDSFGNLFLIIDAMIEFGFTDPEIDDFVFLILGDDNTSMTTISIDRIHQFILFLETYALHRYNMVLSTSKSILTTLRSKIQTLGYTCNYGSPIRDIPKLVAQLCYPENGLKPHTMSARAIGIAYAAAAQDYEFHSFCHDVYNLFLEYYEPDDRANLFLQRQILHNLEDGLPDLATPTVPLFPSFYQVLDVYSSYKGPLSYDPKWTYAHFMNDPDNVPPAHKTMRMYELANDIQVRPAPTFVTVVPST

SEQ ID NO: 774 - protein, 745 aa, Red clover cryptic virus 2
MPFNSARNYLAERMIRTKQELMTYQSEDHNPDAILEKSQDPDYRRYYDNTRFDPSNEVKHRILNKEYSTLVEAYRIKNDRKHQPYELHQPIPEDAAPIPESRVPAPGLKLVPLMYHYGHIVHDPVASESDSDDDNTASERPSKTSIPHFGYPVNKRIYDVIVNVYPEYLKVIGEYCRPIGTVEATFADFNKEQIPSAPINIERKEQVLTHIFKFLDAQPYLPLHFVDTQFCKTPLVTGTGYHNRYSFKQKAHAKYSRPEEYAKLPTSKGYFYNATYENARTLVHFIKQFGLPFNLQYAPEDADPTDEQVQSYIDTANSFFNDYPTLLFTRNHISKRDGTLKVRPVYAVDDLFIIIELMLTFPLTVQARKQSCCIMYGLETIRGSNHYIERLARSYSTYFSLDWSSYDQRLPRVITDIYYTDFLRRLIVINHGYQPTYEYPTYPDLDEHKLYSRMNNLLYFLHTWYNNMTFVLSDGYAYRRTHCGVPSGLYNTQYLDSFGNLFLIIDAMLEFGFSESEIDNFILLVLGDDNTGMTVISIDRIYDFINFLEKYALIRYNMVLSPTKSVLTTLRSKIETLGYQCNHGSPKRDISKLVAQLCYPENGLKPHTMAARAIGIAYAAAGQDPMFHSFCHDVYNLFRLDYKPDARTNLNFQRQIYHNLEDGIPDLATPVVPPFPSLYEVRHMYSKYQGPLSYAPKWNYAHFINDPDVTPPSPKTMRDYEIENDLISRTAPTFETVVPATRNFP

SEQ ID NO: 775 - protein, 756 aa, Rosellinia necatrix partitivirus 6
MSSVFNNVRNYLQERLQHVKREWQIYQATGASSSNMTEERIQQLQDLDTRRMFHTARNAFDTTTNTPGPVSRITEEQRRLIYDAESDKIMNALRQHDEMRSQPFELFMTRPDSDPIPPNRIAAPGIWQSPLQFHTGQIVHADPSTTSVLHPDEHEDYAESYLPGDTDQGYEIDPTIYELLTRKYPEYLPYAQQYCRPKGTTDGTFRDFNKEQKPCPPLDSDRKEHVLKHVFKRLAIDPYLPLHFVDTQYCKLPLVTGTGYHNRYSYRQKAHASFSHPLQYGSRPTSKGYFYNATYENARTIIHNIKESGVPFNIHFAPEDRDITDTEIDEYRRKCNNFFDQYPTLLFTRNHISNRDGTLKVRPVYAVDDIFIIIEAMLTFPALVQARKPDCCIMYGLETIRGANHKLDSLAQSFSTYFTIDWSGYDQRLPRAITDLFYTDFLRRLIVISHGYQPTYEYPTYPDLNEDNMYDRMDKLLKWLHLWYNNMTFVTADGYAYRRMYAGVPSGLFNTQFLDSFANLYILIDGMIEFGFTDEEIDSFLLFVLGDDNSGMTNLSLARLHEFIQFLEAYALTRYHMVLSHTKSVITALRNKIESLGYQCNFGLPKRDIGKLVAQLIYPEHKIKYHTMSARAIGLAYASCAYDKTFYNFCKSIYNIFLDYYEYDEKTALNLSRFLTTGQDDLTTQFSWKILPPFPTREEIRKQISFYHGPLDYAPKWNFAHFINKPDVIPPSSKTMYDYEIEHSLRPQPAPTFVAR

SEQ ID NO: 776 - protein, 709 aa, Rosellinia necatrix virus 1
MVLTIIRDYLHEAQLRLKKEWQTFQKSDQESGYSDKLPTDYDLRRYYDSARDYDAEKHKTEEYQHNFALTHERYTQMNADRNEPFEFYRPLEDNELPDIRFPAPGITVLPFRYHTGQIVETTDELPDSGFSLHPLIDYLTKTKWLHYRPYIDKYCRPLGTTNATFSDFNREQIPSAPIDETRKNMVLPLVIYFLNALPFLPIHFVDTRFCGTPKHTATGYFQRFSTFFRTHAYYARNKLYALRPTSKGYFFNTVYEFSRTWMHHIKEHGYPFVPSHDALDNARQYRIFMQKHVTMLFTRNHISDRDGFLKQRPVYAVDDFFILCELMISFPLHVMARYPINGIKSCIMYSFETIRGSNRYLDSIARDFISFFTIDWSSFDQRVPRVITDIFWTDFLRQLIVINHGYQPTYEYPAYPDLSEHDLYKRMNNLLHFLHTWYNNMVFVTADGFAYLRSAAGVPSGLLNTQYLDSFCNLFLIIDGLFEFGFTQAEILSIVFFIMGDDNSGFTMMDIERLTQFIEFFESYALKRYNMVLSKTKSVITTLRSRIETLSYQCNGGNPKRPLGKLIAQLCYPEHGPKDKYMSARAIGIAYAAAAMDEEFHEFCRDIYHTFLPYAAPIDEHTLSMATKHLPGYFKMLDNIASEIKFDSFPTLEMVQDKYSRWQGYLSHKPKWNDAHFKFLPETVPNNIKTMTDYQLEHKLDTPVPHSLF

SEQ ID NO: 777 - protein, 746 aa, White clover cryptic virus 2
MPHNSTRNYLAERMIRTKRELMTYQSKDRDPDAILEASQDQDYRRHYDNARYDPSNEVKYRILNKEYSTLVEAYRLRNDRKHQPYELHQPIPEDAAPIPKSRVPAPGLKLVPLMYHYGHVVHEPAHSDESDSDDNSDAPTRPVKESVPHFGYPVSKKIFDLIVRVYPEYIKVINTYCRPLGTVEATFADFNKEQIPSAPINSKRRETVLKHIFKFLDTQPYLPLHFVDTQYCKTPLVTGTGYHNRYSFKQKAHAKYSHPEEYAKMHTSKGYFYNATYENARTLVHFIKQFGLPFNLQYAPEDADLTDDQVQSYIDAANNFFNDYPTLLFTRNHISKRDGTLKVRPVYAVDDIFIIIELMLTFPLTVQARKQSCCIMYGLETIRGSNHYIERLARSYSTFFSLDWSSYDQRLPRVITDIYYTDFLRSLIVINHGYQPTYEYPTYPDLDEHKMYSRIDNLLYFLHTWYNNMTFVLSDGYAYRRTHCGVPSGLYNTQYLDSFGNLFLIIDAMLEFGFSDAEIDDFILLVLGDDNTGMTVIPIDRIYDFINFLEKYALVRYNMVLSPTKSVLTTLRSKIETLGYECNHGSPKRDISKLIAQLCYPENGLKPHTMAARAIGIAYAAAGQDFMFHSFCHDVYNIYRLDYKPDARTNLNFQRQIYHNLEDGIPDLATSVVPPFPSLYEVRHMYSQYQGPLTYAPKWNYAHFINDPDDVPPNPKTMREYEIENDLISRTAPTFETVVPATRNFP

SEQ ID NO: 778 - protein, 475 aa, Beet cryptic virus 2; identical to SEQ ID NO: 608

SEQ ID NO: 779 - protein, 478 aa, Beet cryptic virus 3; identical to SEQ ID NO: 610

SEQ ID NO: 780 - protein, 479 aa, Brassica campestris chinensis cryptic virus 1
MDKSTININGYEFREFQGELEDLNQTHSEQIRREPEVTYFDEFAKAEFLDLYPEYYRQYVEGWSRSYYMRSKHMESIFKFSNQNHSINELQPESWQHAIEATRDGLSILPRVRALSVKTELDQVKYIQSSAAGYGYIGAKGPLYGENHDRAIRRAKATLYSATAEDGQGIDYAIRESVPDVGYTRTQLADLTEKTKVRGVWGRAFHYILLEGTSARPLIEAIQEGQSFIMIGSDPIVNVPYVLTETKALCKWLMSLDWSSFDATVNRFEINAAFDLMKEHLVFPDFDTEMAYELCRQIFTHKKVAAPDGKIYWSHKGIPSGSYFTSLVGSIVNKLRVEYLWHLKFGRSPKVTFTLGDDSLIGDDHYYPPDELADKAYNLGWLVNPDKTEYSTLPGSITFLGRSVLGSVNQRELKKCIQLLLLPEFPVESGEISAFRAAAIANDAGGNSEMLNRVARRLKRKYGIAETHQVPLYFRRYQP

SEQ ID NO: 781 - protein, 477 aa, Camellia oleifera cryptic virus 1
MDHQFRGERQALIELAAIPERRSREVYKVIVDRYAAEAIRIYVPYTFRQELEGWARSYYSLQQHVDAILAYQRQKLPEPTDDAWNQTKQHVLTEFRRMDQIDPISYMRFDDVKWIQSSAAGYGYIGRKGDDDNYSKAKRTAVTIAEALDHDRNYGPKALLDSTPDVAFTRTQLSQIKVKSKVRKVWGEAFHYVLLEGLFADPLIRFFKGIDSFYFIGEDPLLAVPALIEEIIRAKDYVYMFDWSGFDASVQEWEIRFAFLCLESLLRFPSNVEAQIWRFLIELFIYRKIAGPNNVLYLKTQGIPSGSCFTNIIGSITNYVRIQYMFKRLTNRFVLVFTHGDDSLTGVETTQFIQMDAFNSICEPLQWKINIDKSEVSRKNQNASFLSRTVKEYQNTRNELACLRMLMYPEYEVTTGDISALRAKSICRDAGINSRYLFEIFMYLKGKYGLAESLPFHLKVWDPTEFEPRPVSASEIM

SEQ ID NO: 782 - protein, 476 aa, Cinnamomum chago deltapartitivirus 1
MLRNIREYEFLEFTNELEDLGQYHIHQVRREPGVTYRDEFALRELNDLYPRLYEQWLQGWSRSFYTGEDHMKAILQYAHPNTPIERLDDRIYQLAMSNVLERLSSLPSVRAFDVKSQLDLIHYEPSSAAGYDYIGAKGPILDANHERAIRRAKAVLWSAIAPDGEGMDHVIRTSVPDVGYTRTQLTDLGEKTKVRGVWGRAFHYILLEGTAANPLLEAFKQGGTFFHIGQDPRVSVPMVLSEISRNCQWLLALDWKSFDATISRFEIHAAFDILKQKVDFPNYETEQCFEICRQLFIHKKIAAPDSKIYWSHKGLPSGSYYTSIIGSIVNRLRIEYIWLTMKGRSPQMCYTQGDDSIIGEDQFIDPVELAKVAEPLGWLINPAKTETSRLPEYVTFLGRTSYGGLNQRDLKRCIRLLIFPEYPVESGSISAFRAASIAQDAGNTSRVLNDVAKRLRRHYGMASPEDVPKQFRLYIP

SEQ ID NO: 783 - protein, 472 aa, Cinnamomum chago deltapartitivirus 2
MAQPYDFMDFQAELENINQRHFHRVFRPEHTIERDKYALHELLAVDPLAEEQYLEGWARSYYSGQQHLEAIFQYAHEDIPLSALHQQTWTDAIQAIRTELRSLPRVRAFSVLTELDQIDFQAQTAAGYDYQGVKGDKDGENHRRAISRAKATLWSALNPSEGMDHVIRTHVPDVGYTRTQLTNLAEKLKVRGVWGRAFHYILLEGTAANPLIQMFQTQQSFFHIGMDPTVSVPRLLSYVKSKAKWLIALDWQAFDASVNRFEIDQGFDLLKELVFFPDPETETAFEISRQLFKHKKIAAPDGNTYWSHKGLPSGSYYTMLIGSIVNRLRIEYLWRVTQGHGPIVCFTQGDDSLSGDNSLINPEDFAQVSGPLGWTMNPAKTEISTIPESVTFLGRSSSGGLNQRDIIKCLRLLIYPEVPVTSGDISAFRATSIAQDVGGTSSRLNEVARKLRRKYGIAEESKVPRDLRRYFA

SEQ ID NO: 784 - protein, 484 aa, Conifer deltapartitivirus
MFRSLASCVYKMDHRYRGATTGLIELGAVSERRSREECEILVDQYSKEAIDHFVPYTLRRELIGWARSYYTLEGHMAAIMKYDRPKIPEPKDQTWNQVKQMVLTEARRWPKVRCKSYLNFDEVKWLRSSAAGYGYVGLKGDSENYSIAKRTAVTIAERLNHDRSYGPEALENSTPDIAFTRTQLSLIKVKRKVRNVWGEAFHYVLLEGLFADPLIEYFIENRAFYFIGRNPLLAVPALIEEILSESDYIYMFDWSAFDASVQEWEIRFAFEILETILIFTSSVEEQVWRFLIELFIYRKIACPDGTLLIKTMGIPSGSCFTNMIGSITNYVRIQYIFMKLTSNPVTAFTHGDDSLAGVNATQYIQMDTISAFCSQFLWELNASKSDVSNKLENISFLSRTVREGQNARDELLCLRMLQYPEYPVQDGSISALRAESIYQDSGVTSQYLPQISIFLMRKYGKAQNLPRELARWDLIQYEMLRASA

SEQ ID NO: 785 - protein, 379 aa, Dactylorhiza hatagirea deltapartitivirus
AIQNELRSLPNAEAFDVLSELDKIHYEQASSAGYDYIGVKGPIQGDNHKRAIHRARATLWSTIRDREGGPKYVIEQSVPDIGYTCTQLTNLTEKTKVRGVWGRAFHYILLEGTSARPLLDMFTHNKTFFHIGEDPILSVPRLLSEVSKTCKWLYALDWSSFDATTSTFEINTAFNLLKEKVQFPNYETEQAFELSRQLFIHKKIAAPDGFTYWSHKGIPSGSYFTSIIGSIINRLRIEYLWRLITGRAPKICYTHGDDSLIGDDTLIKPEDLASAAQPLNWIINPNKTEYSTSPEFVTFLGRTTKGGFNSREIDRALRLLIFPEYPVETGDISTYRAESIAQDCGNMSQIINIIANRLRRTYGIAQTDKVPKHFLRYIP

SEQ ID NO: 786 - protein, 472 aa, Fig cryptic virus; identical to SEQ ID NO: 599

SEQ ID NO: 787 - protein, 497 aa, Ilomantsi deltapartitivirus
MFVKRNEMDRPTHNTLEFVQRVKPHHIKRDPWLVDPFVKESLEDMLGHSAVEEYGNYTRSFYTLEGHYFNLWKYDQPITPPIDDPIFDLAVQKARESLRLPAPVMTHNWERLKDVPYISSSSAGWGYHGKKGAPGNQDQAIERANAYLRWWLDMRYGKSRYDYLYHPDLAWTRTQISEVDSPKIRHVWGKSFENIILEGISAAPLVHAYRDFDSPIVIGKNMYKRLPLIISKVLNNSDDEYRPNFGIGIDFKSFDTSPQEWLIDIAFDILEDNLAFTGYYEYESFNYSKYYFTHTPVVMPDGRLWRKHLGIPSGSYFTQLIGSTINLILMYYIQLTLYQETFQTYVLGDDSLFGIPAEYGYPDLERMAAIVSPLGFTIHPHKCVVANRPQELHFLGHYARHTRVDRDEAELMRMVLYPEYPVDGPAMSMSRVLGMMIDSALNSWSAVQLYKYMKIKYRNLLPETLYFTTDMKDWLVAVVGTAPEQHLLTEFEIFNIT

SEQ ID NO: 788 - protein, 499 aa, Inari deltapartitivirus
MLSVVKRSEMDRPSFNTLEFVQRVKPHHIVRDPWLVDPFVKECLEEMLGCTAVEAFGLYTRSYYTPEGHYHNLWQYDRLYSPRPTDSIFYDAVAHTANTLRLPRPVEPYSWHRLADVPYISGSSAGWGYRGKKGDGDNHRLAIKRANAYLLWWRDNMDGTSNRPYRYHPDLAWTRTQLSDQTSPKIRHVWGKSFENIILEGITAAPLIDAYRASDSPIVIGLNTFKRLPLIIAQACSGSPNNPMPQYGIGIDFKSFDSSPQPWLINLAFDILEQNIHFTEEEQRLSFEYSKYFFIHTPVVMPDGRLWRKHLGIPSGSYFTQLIGSVVNHIIISYVQLKLYGRTFKTWVLGDDSLFGIPAELGLPDLSAMAKLVSPFGFTIHPDKCTVAMNPRDLDFLGHCARFARVEREDARLMRMVLYPELPVIGPAMSMSRVMGAMIGSAMTSLPTLQLYRYMCAKYRAILPDDLEFTHSDKDWLVAVVGLPTRHPLLTPSEIFSIT

SEQ ID NO: 789 - protein, 477 aa, Japanese plum-yew deltapartitivirus
MEHRFRKERTGLIEIGTVSQRDTRKEFEIIVDQFAAEAIDAVVTPTLIRELDGWARSFYTLEGHMNAIMKYNRIKTPEPTDDAWNRTKQFCRTLFHSWPKVTALSYTNFDAVKWVHASAAGYGYAGSKGENDNYHKAKKTAITISEKLNHDRSYGPTALQNSTPDIAFTRTQLSQIKVKRKVRNVWGEAFHYVLLEGLFADPLIEFFKNSNTFYFIGRNPLLSVPALIQEVLTYYDYVYMFDWSAFDSSVQEWEIRFAFELLSSILLFPTPVEEQIWRFVTELFIYRKIACPDSTLFIKTIGIPSGSCFTNIIGSIANFVRIQYIFIKLTSKPARVYTHGDDSLAAVNADQYIPIQNIKILCDSLTWELNATKSDVSNQAEGVNFLSRTVREGQNARDELTALRMAKYPEYPVLEGSISTIRVEAINLDSGLTSQQLFKVFQYLERKYGKAPNLPRELSRWDPVEHESLRLSYDSLM

SEQ ID NO: 790 - protein, 477 aa, Medicago sativa deltapartitivirus 1
MVLNALHDYDFLDFRSEVERTSHKHSHGVRREPYTTEVDRWAKGLLMNLHSELYKQSIEGWSRSYYDPARHLEAIYNYAAPDIPLTNIDWQLYTDCALTIRQGFYSLPRVKAYDVRTELDKVSYKASSAAGYSYQCVKGPVGGPTFKLAVRRARKVVGEVHEQGVPGMKHLIETMVPDIGHTRTQLTNLLEKTKVRNVWGRAFQYILIEGTVADPLIRMFSESKTFYHIGRDPLDSVPEVISEAAAAGKWLYAIDWKQFDATVSKYEIVTAFELIRNLIDFPNEQTQVAFEISKQLFIHKKIAAPDGWVYWVHKGIPSGSYFTSIIGSIVNRLRIEYLWRKITGHGPKVCFTQGDDSLSSDDQFIPPERFAEVAYPIGWIINPDKTEYSTVPGEVSFLGRTMIGGSNVRDTLKCIRLLMFPEYPVESPQISAYRAQSIAEDAGGRSAILNEIASKLKTDYGVAQEHEVPAHFKRYVM

SEQ ID NO: 791 - protein, 479 aa, Pepper cryptic virus 1; identical to SEQ ID NO: 606

SEQ ID NO: 792 - protein, 478 aa, Pepper cryptic virus 2; identical to SEQ ID NO: 604

SEQ ID NO: 793 - protein, 475 aa, Plant associated deltapartitivirus 1
MRTITHYEFTNFSQDFEETGKTHTHAVRRDPEVTYEDTFAMKVLMNKYPALYDNIIRGWSRSYYSGEAHMKAIMQYATPNTNYEQCNKKAYEQAVANVQESLRSLPTVRAFNVMNELDLVPYESSSAAGFDYISVKGPTEGENHIRAIKRAKATLMSAIADDGEGIEHTIETYVADVGYTRTQLTDLREKMKVRGVWGRAFHYILLEGTSASPLLEAFAKSNTFFHIGKDPTVSVPNLLSYTKSQARWLTAIDWRAFDATVSRFEINHAFNIIKKCISFPNFETEQAFELSRLLFTHKKLAAPDGKIYWIHKGIPSGSYFTSIIGSIVNRLRIEYLWLLQYNRSPKTCFTQGDDSLIGDDELFSPMDMSYLVNHLNWWINPTKSMTSKIIEEITFLGRSSLGGLNQRDLKRCLRLLMLPEYPVTSGAISAYRANSIWRDSGSTSQILLEIATTLRRKYGIASRDQVPRYLRPWKA

SEQ ID NO: 794 - protein, 479 aa, Plant associated deltapartitivirus 2
MDKSTINLNGYEFKQFSSELEDLHQNHSEEVRRMPNITLYDQFALDELSDLYPQLYEQWIFQWSRSYYTSDKHLEAVMKYANQNIPINRLNQDVWTQAVDAVRDGLRNLQRVRALSVKTELDIVKYIQSSSAGYGYIGAKGPLREFNHMRAIKRALATLYSATAADGEGPDYAIRESVPDVGYTRTQLTDLTEKTKIRSVWGRSFHYILLEGTSAKPLLEGLMTNPTFIQIGSDPIFNVPAKLSELHEKFKWLYSVDWSTFDATVHRFEINTAFDLIKERLFFPDFDTEMAFELSRQLFIHKKIAAPDGKIYWSHKGIPSGSYFTSIIGSIVNRLRMEYLWRLKYGRGPGCCYTLGDDSLIGDDLYYNPQELSDTAMQYGWIINPDKTECSTNPGAITFLGRTSVGGQNQRDLKRCVRLLLLPEYPVASGDISAFRAKAIAQDAGGNSEVLNRIAKRLKQKYGIADESVVPSYFRVYQP

SEQ ID NO: 795 - protein, 476 aa, Plant associated deltapartitivirus 3
MLRDIRDYQFTEFTQELEELPGDHPHIIRREPEQVITDNYALAILNDAYPTLYEQSLQGWARSYYTQEGHMNTIMAYATPDTPYSAVNHELYQQAFDAVQNELCSLPLTRAFNVLTDLDKIRYEQSSSAGYNYIGPKGPIDGDNHKRAIRSAVACMWSALRDTDGGPAYFLTQSVPDVGYTRTQLADLSVKTKVRGVWGRAFHYILLEGTAARPLLDAFIEGKTFLHIGEDPQHSVPDILSNVSRHAKWLYALDWSGFDTSVSRFEIEHAFKLLKARILFPNNETEQVYELSRLLFTHKKIAAPDGKIYWSHRGIPSGSFYTTMIGSIINRLRVEYIWRQIKGRGPKLCYTQGDDSLIGDDELIHPRDMAAVAAPLGWTINTDKTAFSTSPEFVTFLGRTTYGGFNQRELMRCIRLLVFPEHPVESGSISAFRARAINQDSGHTSEIIRTVAERLRRLYGIPSDKDVPAHFRRYYA

SEQ ID NO: 796 - protein, 474 aa, Plant associated deltapartitivirus 4
MAATNINIRDFVFTDFQSELECTNQRHHEGVGRESETIYEDEFAKAELLEIEPHLYERWIQGWARSYYTGEKHLDAILQYATPNIPINRLNQHVWRQSVEAVRDGLRSLSRVRALSVQTELDSVYYIQSSSAGYGYHSAKGEQGGEVHNRAIRRAKATLYDAIRPDGHGIEYVIKESVPDVGYTRTQLANIAENLKVRGVWGRAFHYILLEGTTARPLLESAQVSNTFMMIGRDPTTSVPGLLSSIKGQYKWLTSIDWSQFDATVSRFEIQTAFDLLKERVIFPDFETEMCFELCKQLFMHKKIAAPDGKIYFSHKGIPSGSYYTSLIGSVVNRLRIEYLWRLRFNRGPQACYVLGDDSLIGDDDLFDPADIAEMAYPLNWLTNPNKTECSTIPGMITFLGRTVKGGMNQRDLKRCLRLLILPEHPVESGDISAYRAESIAADAGFTGSVLNTIAKRLKKFYGIASEEEVPIKL

SEQ ID NO: 797 - protein, 478 aa, Plant associated deltapartitivirus 5
MTATNINIRDYNFTSFQGDLELTPVRHHETIRRESETIYEDEFAKAELMEIEPQLYERWISGWARSYYTGEKHLEAILQYATPNIPINRLNQQVWRQSVEAVRDGLRSLSRVRAHSVETELDSVYYIQSSSAGYGYNSAKGEPRGDTHMRAIRRAKATLYDAIRSDGHGIEYVIKESVPDVGYTRTQLANIAENLKVRGVWGRAFHYILLEGTVARPLLESAQVSDTFMMIGRDPTTSVPGILSKIKGDYEWLTSIDWSQFDATVSRFEIETAFELLKERVIFPDFETEMCFELCKHLFMHKKIAAPDGKIYFSHKGIPSGSYYTSLIGSVVNRLRIEYLWRLRFNRGPKVCYVLGDDSLIGDNEFYDPEDLAYRAYPFNWLTNPNKTQCSTIPGLITFLGRTIKGGMNQRDLKRCLRLLILPEYPVESGDISAYRAESIAEDAGRTGATLNKIATRLKKIYGIASEEDVPIKLRRYY

SEQ ID NO: 798 - protein, 478 aa, Plant associated deltapartitivirus 6
MTSYRMLNDYDFTAFGSDLERLDQSHAHRIRREEATTYRDEFALKELMDINPILYEQFLVGWSRSYYEGSKHLEAVLQYGIPDPNLNLVDNEVYSQARDVVLESLGSLPRVRAFDVLTELDLVHYEQSSSAGYDYHGPKGPIGGENHKRAITRAKATLWSAIAEDGEGIDHVLTTSVPDVGYTRTQLTDLYEKTKIRGVWGRAFHYILLEGTSANPLLEVFKRGETFYHIGSDPQYSVPGILSQVSEHCKYLVAIDWSNFDATVATFEIHAAFDILKSMLTFPNVETEQCFEICRQLFIHKKIAAPDGSIYWSHKGIPSGSYFTSIVGSIVNRLRVEYIFRKAYNVGPKMCYTQGDDSLIGVDFRVDPEKLSDIAAPLNWKLNPAKTEVSMYPEYVTFLGRTMYGGINQRDLKRCLRLLIFPEFPVPSGEISAYRAVSIAKDAGGTSDVLNQIATRLRRKYGVARDEDVPRHFKQYIP

SEQ ID NO: 799 - protein, 480 aa, Port Orford cedar deltapartitivirus
MHTMDHRFRSLPRGLIELGQIPERRLREEFQIIIDPYINEAINDTINVTLIRELDGWARSFYTIEGQMMQISKYDRLKLPEPALPAWNAAKQHARNVFRTLPHVRAISYQDFDSVKWLRASAAGYGYVGTKGDNDNYHKAKKTAVTIAEKLNHDRSYGPQALESSTPDIAFTRTQLSQIKVKRKVRNVWGEAFHYVLLEGLFADPLIQLFKECQTFYFIGKDPLLAVPALIQEILIQYDYVYMFDWSSFDSSVQEWEIRFAFELLESILVFPTSVEEQIWRFVIELFIYRKIACPDGTLKLKTLGIPSGSCFTNIIGSIVNYVRILFVFIKLTSKPAEAFTHGDDSLAAVNSEHYIPIQNIKEVCDPFQWELNATKSDVSNRAEGINFLSRTVRAGQNYRDELTALRMAKYPEHPVLEGRISTLRVESILLDSGLNSHNLFRIFKYLEQKYGKAENLPRQLARWNPLEYESLRLSYDSTM

SEQ ID NO: 800 - protein, 477 aa, Quinoa-associated deltapartitivirus 1
MAVHTLHGYEYTSYEHDLELIGGFHLHQVRRESSVTYRDEFALRELIETYPVLYEQILEGWSRSYYTGEAHLNAILQYGQPNITLTQEDLPLWIRARQSVSELLGSLPHVRAFDVNTQLDIINYEPSSAAGYDYNGAKGPTGDFNHTRAIHRAKATLWSTIRDDDFRPDHTIQSAVPDVGYTRTQLTDIRDKLKVRGVWGRAFHYILLEGTTADPLLQAFKQGTTFLHIGSDPTISVPQILSDVAKSCKWLIALDWRAFDASVNRFEIHTAFNLIKERIEFPNRETEECFELCRHLFIHKKIAAPDSKIYWSHKGIPSGSYFTSIIGSVVNRMRIEFLWLKLKGRGPKMCFTQGDDSLIGEDEYVNPNDLAELAAPLGWALNAAKTEVSRMPEYVSFLGRTIYGGLNHRDITKCIRLLIFPEYPVESGSISAYRAKSIAEDSGGTSKILNDIARSLRRKYGLALESEVPKKFKIYVP

SEQ ID NO: 801 - protein, 480 aa, Quinoa-associated deltapartitivirus 2
MSNINISGYEFTDFQRDFERLEGTHSEQVRREPEVTYYDEYAKAELRDMQPELYRQWIEGWSRSYYLREKHMDAILQYKTPNTPLTRLDTEVWQEAIDAVKNELSSLRNSRALSVITDLDQIYYVQSSAAGYGYIGAKGDIYGVNHDRAIRRAKATLYSATARDGEGIEYTIRQTVPDVGYTRTQLADLNEKTKVRGVWGRAFHYILLEGTSARPLLESIMQGDTFIMIGCNPVIDVPRKLSEIAGNPNVKWMTAIDWSQFDATVSRFEMNTAFDIIKEKITFPDFDTEMAFELSRQLFIHKKIAAPDGRIYWSHKGIPSGSYYTSIIGSIVNRLRIEYLWRFKFYEGPEYCYTLGDDSLIGYKEYWDPNEIADLAKQLNWIMNPSKTECSTIPAGITFLGRTSRGSQNQRDLKKCLRLAILPEYPVTEGKVSAYRIQSIYEDSGSTSSVLLRLAKRLRTKYGFPTEEEIPRLHRPYTFM

SEQ ID NO: 802 - protein, 477 aa, Red clover cryptic virus 3
MVLDAIRGYSYTDFEGDLIKTVEKHSHRVKRDLYTTYVDKWAEKLLINAHSELYKQCIEGWSRSYYDPERHLEALYNYAVADIPLSRIDVDLYEQCKNVIRQGFHSLPRVEAYDVRTELDKVSYKASSTAGYGYQCVKGPIGGETFMTAVRKARKVVGEVTDLGTQGMDHLIKTLVPDVGHTRTQLTNLLEKTKVRNVWGRAFQYILIEGTSADPLIRMFSKNNSFYHIGRDPLDSVPEVISEAAGAGRWLYAIDWKQFDATVSRFEIEAAFALLKELIIFPNEQTEIAYEISKQIFIHKKIAAPDGFIYMAHKGIPSGSYYTSIVGSVVNRLRIEYLWRTITGHGPSVCYTQGDDSISSDDTFIPPERFAQVANNIGWIINPDKTEYSTVPSEISFLGRTMVGGANIRDTKKCIRLLVYPEFPVESPQISAYRAHAIAQDAGGLNAILNRIAGKLKTDYGMAPEETVPAHFKRYVM

SEQ ID NO: 803 - protein, 480 aa, Ribbonwort deltapartitivirus
MGAMMAAQELITHYVYRDFNGPLEKLNMSHPHKINREEAVTLIDSFALEELNSLSPILFEQHLQLWARSYYSKEKHLDSVLCYGSRDLSRSDFDQVAWNHAIEATRTELRKLGRVRAFDVLTELDQVPYESQSSAGYDYIGKKGQFRDTNHRRAMGRARAIVGEVVDDPNGMERAILTMVPDVGYTRTQLTYLPEKLKVRGVWGRAFHYILIEXXXXXLMEAFKETDTFFYVGKDPVRDVPNTIHKAKRNGEWLFTLDWSRFDATCSTVEINQAFDLIKECLEFPNWNTEVAFEVSRQLFIHKKIAAPDGKIYWSHKGTPSGSGFTMIIGSVINKLRCEYIWFKLYSRSPQFLVTQGDDALGSDDTQFDVDRAADTAAELGWILNPGKTEVTKHPQLVEFLGRGEKGGINSRELIRCLRLLIYPEMEVDSGIISAFRARAIADDAGGLSELLNRIADRLELKYGLPTKDDVPKSFWIYTP

SEQ ID NO: 804 - protein, 478 aa, Silvergrass cryptic virus 1
MDHSFRGIRQGLIELKKISERRSRDEFRVYQDEYAAEAIRLIVPMNIRFELQGWARSYYDLQQHVQAIEAYNLPKLPEPTHIAWNQTKQMTQAIFRQFDQIDCLSYKDFDSVKWMSSSSAGYGYEGHKGDDDNYKKAKKTAVTIAEKLNHDVNYGPEAIKESTPDIAFTRTQLSQVKVKTKVRNVWGEAFHYVLLEGLFAQPIVEYFMNINSFYFIGKDPLLSVPALIDEMLRNKDYVYMFDWSAFDATVQEWEIRFAFECLESMIQFPSTVEFQIWRFVIELFIYRKIASPHGVLYLKTQGIPSGSCFTNIIGSITNYVRIQYMFNRLTGSFATVYTHGDDSLAAVNSDQFVHFNALEKIASEHLWKLNASKSSMSMKQEGVTFLSRTVREGQNRREELACLRMLMYPEYPVESGDLSALRAFSIMNDSGLHSSYFLKIFQLLKENHGIAASLPNHLKIWDPKEYEARKVSYSMYVM

SEQ ID NO: 805 - protein, 471 aa, Spinach deltapartitivirus 1
MEGLTFLGTIPARHLREEYVILTDQPVYDSVKDYASNADMQEIDGWARSFYTLEGILDSIQLFSKPLIPEPTDSLWDETKQEVFNEISNLFTPVTSLSFETGFDSVPYEHSSAAGYGYTGKKGEGDNLHRAKAIANKAVLDFSETIDKDGFQTAVDNMVQQSTPDVAFTRTQLAKLPSIKVRIVFGEAFHFILIEGLSAAPLLEAFKRTDSFYFTGKDPTIHVPQLIHKMGLEEGWFVCLDWKSFDSSVQLWEIDFAFSCVESLLTFPSENTRRAFYLARESFKHRKLAAPDCKLWMRKGGIPSGSYFTNIIGSIINYTRITYVCKRLGLRKTSCYVQGDDSVTFVQTGQRPDLYQLQALGTEFGWSLNIPKCTITQSSHNVTFLGRSQVHQLNTRERLKVLRLMCFPEFKVEDPKISTARVKAIARDAGWNDPLYTRIYLRLSRLYGEVERLPPHLMTYVDRLDFQDVNM

SEQ ID NO: 806 - protein, 477 aa, Subalpine fir deltapartitivirus
MDHQFRKERRGLIELGVIPERLIRDECEILVDPYAEEAIDRLASVDIKRELAGWARSYYTLDGHLEAIMKYDRLKIPEPTEQAWNRTKQYVLTEFRRMPTVEVLSYKDFDKVKYLRSSSAGYGYIGLKGAPGNYERAKRTAVTIAESLNHDPAYGPEAIANSTPDIAFTRTQLSQIKVKRKVRNVWGEAFHYVLLEGLFADPLIKSFMERHTFYFIGKDPLLAVPALIQEILSYTDYVYQLDWQAFDSSVQEWEIRHAFHLLEQLLVYPSKVEKQIWHFVIELFIYRKIACPDRRLRLKTLGIPSGSCFTNIVGSIVNYTRIQFLFMKLTREPSVAYTHGDDSLAGVSATQYIPLSVLSESCTPYDWQLKLEKSLISSEAEQTTFLSRTVREGQNFRDTLTCLRMLKYPEYPVPTGDISTLRAFSIAKDSGLSSTLLTKIFQYLQCKHGMAQTLPLNLQRWDPFEYELLRQSFSTTL

SEQ ID NO: 807 - protein, 495 aa, Taiwan douglas-fir deltapartitivirus
MARKFIGGILILHNNTMTNLHQSIHKRYTKPMELISRTRAIPGRDECIIYRDETLLRALSTRNPELTQELDGWARSFYTKEGHLSAISAYDRIDVPFPQDEHSQLVDEHLERVFDGFTQQDSLSFETQLKLVHFESDSAAGYGYTGRKGDSDNHRQAVRTANATIRDLFNNLEGDTVSATINWLHNTTPDIAFTRTQLSYLPDKMKIRNVWGAPFHSILIEGLTAQPIMEYFATHRTFFTIGEDPKIRVPQLISELIARNTVYCIDWSGFDASVSAEEIDFAFSLIKRMLNFNSHYDELCFEVSRLNFIHRKLIDPEGKILLKHRGVPSGSFFTMIIDSIVNARRILYIFHSITRVMPEIHCQGDDSLTGVPANYQVSRGHISAICQRQLWTINPDKLKISRYPVELEYLGRTSSGDYNFRERQKVIRLAIFTEYPVASPQISAARAHALCIDSSFRIPELVQAWKSLTRHYGEVPPEQLDRRLRPYDPTKFLRA

SEQ ID NO: 808 - protein, 350 aa, Tree fringewort deltapartitivirus
VPFEGTASSGFDYVGKKGPIFGANHRRAMARARATIGHIVDDPTGMERSILTMVPDVGYTRTQLTEVREKLKVRGVWGRAFHYILIEGTSAAPLLEAFKNNDTFFYIGKDPTVDVPNTIHSAKRNNTWLFTLDWSAFDATASTIEIDAAFDLLKEALDFPNFDTEVAFEFSRQIFLHKKIAAPDGSIYWAHKGIPSGSYYTMMVGSVINKLRCEYIWHALYEKSPDYLVTQGDDGFGADDIQFDPDEAAHLVKHLGWKLNPDKTEVSMHPQNMEFLGRTEKGGLNSRELVRCLRLLAFPEQEVPNGIISAYRARAIADDSGGTSQLLNTVAERLEAKFGIPDEKDIPKAF

SEQ ID NO: 809 - protein, 497 aa, Vaasa deltapartitivirus
MFVKRNEMDRPSNYTLEFVQRVKPHHIKRDPWLVDPYVKESLEELIGRSTVEEFGSYTRSFYTLEGHYSNLWKYDRPITPPINDPIFDLAVQKARESLRLPVPVSTYNWERLKDVPYISSSSAGWGYIGKKGAPGNQTRAIERANAYLRWWLDMRYGKARYNYLYHPDLAWTRTQISEIDAPKIRHVWGKSFENIILEGISAAPLVQAYRDFQSPIVIGQSMYKRLPLIISQVLHNSDDEYRPNFGIGIDFKSFDTSPQEWLIDIAFDILEDNLIFSGYYEYESFNYSKYYFTHTPVVMPDGRLWRKHLGIPSGSYFTQLIGSTINLILMYYIQLKLYNKTFMTYVLGDDSLFGIPAEYGYPDLDQMAAIVSPLGFTIHPHKCVVANRPQELHFLGHYARHTRVDRDEAELMRMVLYPEYPVDGPTMSMSRVLGMMIDSALNSWAAVHLYRYMKAKYRNLIPNTITFTTDMKDWLVAVVGTAPEQHLLTEFDIFNIT

SEQ ID NO: 810 - protein, 477 aa, Yunnan larch deltapartitivirus
MDHPFRKELRGLIELEVIPERLIRDECMVLEDSYAAEAIDRLAPVDVKRELAGWARSYYTLEGHLEAIMNYDRIKIPEPGEPAWNRAKQHVLTKVRRLPKVEALSFKDFDQVKYLSSSSAGYGYIGLKGDPGNYERAKRTAVTIAESLNHNPSYGPEAIANSTPDVAFTRTQLSQIKVKRKVRNVWGEAFHYVLLEGLFADPLIRSFRSRNSFYFIGRDPLLAVPALIQEILSYTDYVYQLDWSAFDSSVQEWEIRYAFHLLEQLLVFPGKVEEQIWHFVIELFIYRKIACPDRRIRLKTLGIPSGSCFTNMVGSIVNYTRIQFLFLKLTKQPAIAYTHGDDSLAGVSTTQYIQLHILQAACEPYDWQLKAEKSAISSEAEQTTFLSRTVREGQNFRDTLTCLRMLKYPEYPVPCGAISTLRAYSIAKDSGLSSNLLTKIFQYLESKYGMAQTLPLNLQRWDPNEYELLRQPHSSIL

SEQ ID NO: 811 - protein, 540 aa, Cordyceps chanhua partitivirus 1
MSLEDSSDPTLLDLVESVPVETDVSALTPSRRVRGQSYDIIPSRFNSPNLREVARYGGYGVYGGQSNTDPWVRTTLKTFSREIYEQIYGYTRKPQGTPGMYRSLLKFSDDKYPFRGLSREQRQAMQTAIGLARKAFKLPYKSEPLDWHEVGQHFRRDTAAGVSFMGQKKGDVMPEIYHKARWLGHRMKQSGRARFNPTRVQFPPCVAGQRGGMSEASDPKTRLVWVYPAEMLVVEGQYAPVMYRKYMEWEHSPMLNGKSAQRLYTEWTCGLRDGETLYGLDFSGFDTTVPAWLIRVAFSILRQNIEWEYWRGEKVTKRESMKWKNVWDGMVWYFINTVILMPDGRMFRKYRGVPSGSWWTQMVDSVVNWILITYMGLCQAAQIRNLKVLGDDSAFRSGSPICLERGASDLRRVGMKLSTEKCEVTCDPGDFKLLGARYRYTRAYRDTEEWFKLLLYPESAVRDLGVSMSRLVGLWLGGAMWDDTFCRFFEYYQRSFPCPVEGWFSKDQRRWLEVVYSGKAPRGWSNRKSLFWRSIFYTFG

SEQ ID NO: 812 - protein, 543 aa, Erysiphe necator associated gammapartitivirus 1
MTFESSDPTLLDIATVEESPSVDDSLLVPSNRTRGASYDVLEQDFKSQNLSEIARYGGYSTYSGASNTDPWVRNALKTFSRDRYEEIYGFTRRPEGTLGMYRSLEKFSGNSGSFNSLNRVQRRAMIKAISRAKKAFKLPWKQEPLDWHEIGQYLRRDTSAGVTFMGSRKGDVMEEIYHEARWLGHRMKQDGTQRFDPSKMRFPPCLAGQRGGMSEATDPKTRLVWVYPAEMLVVEGQYAPRMYHAFMADPHSPMLNGKSSQRLYTEWTCGLREGEKLYGLDFSSFDTKVPSWLIRVAFDILRQNIDFSVWNGSKVSKRDAQKWRNVWDGMVWYFINTPMLMPDGRMFRKHRGVPSGSWFTQMIDSVVNYILICYLTDCQDCEIRNLRVLGDDSAFRTGDKFDLETAQIDANVVEMVLKPEKCEISVDPNEFKLLGTTYRDGRPHRETVEWFKLALYPESSVRSVEVSLSRLVGLWIGGAMWDREFSLFMEYFQTCFECPSEGWFSKDQRRWLEVVYGSGKSPRGWTTKRSLFWRSIFFSLGHS

SEQ ID NO: 813 - protein, 539 aa, Gammapartitivirus sp.
MDDYTQDPTHHYILAKGSHLVDALHLRPAKSGSTTSEEVVPSNFQNPNLREIAKYGGYATYSSNSNTDPYIRETLKLFSRDIYEDIRGFTRRPEGTPGMYTALHKFAGEKNTFNDLSPTQRIAMHKAIAKTKKAFKLPYRREPLDWHEVGQFLRRDTSAGATFMGAKKGDVMEDIYHEARWLGHRMKQDGKRRFDPRKMRFPPCLAGQRGGMSERDDPKTRLVWIYPAEMLVVEGFYAPMMYRDFMSDPNSPMLNGKSAQRLYTEWCCGLREGETLYGIDFSSFDTKVPAWLIRVAFDILRQNVNFETFGGKPVGKQDAQKWRNVWDAMVWYFINTPILMPDGRMFRKYRGVPSGSWWTQMIDSVVNHILVDYLAECQKVEIRNLKVLGDDSAFRSNDQFDLEVAKGDCVPTGMVIKPEKCEKSRDPSDFKLLGTTYRDGHVFREDDEWFKLALYPESSVLTLDVSFTRLIGLWIGGAMWSRKFCEFMDFYQKSYPCPEEGWFSKDQKRWLEVIYSGKAPRGWTTKRSLFWRSIFYAYG

SEQ ID NO: 814 - protein, 539 aa, Metarhizium brunneum partitivirus 2
MEDFTQDPTQHYVLAKGSHLIDALHLRPAKTGSTTSEDVLPPSYRDDNLAEIAKYGGYSTYMSNSNTDPWVRETLKLKDREMYEHIRGFTRRPQGTPGMYKALAKFGGEKNTFSSLSPWQQRAMKRSIKKAFKAFKLPYKREPLDWHEVGQFLRRDTSAGSTFMGSKKGDVMEEIYHEARWLGHRMKQDGKKSFDPTKMRFPPCLAGQRGGMSEVDDPKTRLVWIYPAEMLVVEGFYAPLMYRDFMNDPKSPMLNGKSAQRLYTEWCCHLREGETLYGLDFSSFDTKVPAWLIKVAFNVLRQNINFETFEGKPVSKRDAQKWRNVWDAMIWYFINTPILMPDGRMFRKFRGVPSGSWWTQMIDSVVNHILIDYLADCQKVEIRNLRVLGDDSAMRSSDQFDLETAQQDCEPLGMILKPEKCDKTKDPSDFKLLGTKYRDGRVYRATDEWFKLALYPESSVFTLDISFTRLIGLWLGGAMWDKKFCEYMDYFQTSYPCPEEGWFSKDQKRWLEVIYSGKAPRGWTTKRSLFWRSIFYTFG

SEQ ID NO: 815 - protein, 539 aa, Ophiostoma partitivirus 1
MSDFTQDPTQHFVETEGSHLVDALHLGPQNTRSTTSQDILPDKHAGRYLKQIAKYGGYGTYQSTSNTDPWVRETLKHFDRKQYEELRGFTRRPDGTQGMYRSLAKFDGEDQSFHLLSRSQQRVMRKSIRKAFTAFKLPYKREPLDWHEVGPFLRRDTAAGSTFMGSKKGDVMEEIYHEARWLGHRMKQNGDRRFDPTQMRFPPCSAGQRGGMSSIDDPKTRLVWIYPAEMLTVEGFYAPRMYHDFMNDSNSPMLNGKSSQRLYTEWVCGVREGEKLYGLDFSSFDTKVPPWLIRVAFNVLRQNVAWDTFEGKPVSKRDRQKWRNVWDAMVWYFINTPILMPDGRMFRKYRGVPSGSWWTQMIDSVVNYILVDYLAGCQEVEIRKLKVLGDDSAFVSGKDFSFSQATADCIPTGMVLKPEKCDVTDNPSEFKLLGVKYRDGRVYRPTLEWSQLALYLESNVPDVGVGLSRLIGLWLGGAMWDKQFCAYMDYYQSSYQCPEEGWFSKEQRRWLEIVHSGKSPRGWTTKRSLFWRSIFYAFG

SEQ ID NO: 816 - protein, 533 aa, Aegean partiti-like virus
MSKSQGGINVHHTQILRDISNIIYSNEDYTRKVEEVSTLKEEFSFVISDKLKNKLLQFSVPSIEKGIYGVVTKVFPRFKNKIILDYTVTSQDIKDADSSELKVYARNKEVVLSSSVYPAFLIVIKKTFFRMFNGLNKSNLKISHDEAMELLPSSTSACYPTFSKKGSTISQFDCRKRMKTFGSLSSLNSMITFLYEHPTVIFHRVSNKLVKRKDGMYFSTPKIRQVFGIPHFICALEGVYFKEIMEGYKRSHSDRITIGYRKVEVSESVRYMRMKAKETDKEIFCGDISGCDKSVPALFTFIFALFSLNLYDSVRDANFILSLLHYFCYTPVVYSGVKKVVTNGSTTSGSALTSMFNTFVILICLETVFFVLNGRLPDKGEVLVQGDDFLILLKGKDEVVKLKNIMGQFNFRIRADADLLCSDGQDVEFLGFKWDKYCSPYQSEEWFVAKLLFPGRRVNYPGPGRLIAKYLSLLFQVRNYHSLYYKFYKHDIHLRQHIIMGKDPCLTLIDNRGRVAKTIFPVSYFLRKGWKAF

SEQ ID NO: 817 - protein, 500 aa, Alloteropsis cryptic virus 1
MFIFRICDPNKFSCIAHVGFNHPWRSLERGLIPHKMIAPRKSREEEVILIDHYAAEQIDRHVPLHIRLELDGWARSFYTHEAHMNAIKSYNKPKLPPPSDTAWSQTLQHTRTIFNRLPKVNTIPYTEMDRVKWVRSSAAGYGYTGLKGEGDNYEKARKTAFTLAEMLHHDPGYGVTALLNQTPDVAFTRTQLCQIKVKRKVRNVWGEAFHHVLLEGLFADALIKMFAEQDTFYFIGRDPLLSVPLLIAEILSEYDYVYMFDWSGFDATVQEWEIRFAFECLESLIKFPSNVERDIWHFIIELFIYRLIAAPDGTIYLKTMGIPSGSCFTNIVGSIVNYIRIQYLFKRLTDDWAHVFTHGDDSLAGVKTIQYVPMANFGSICNEFLWAINLDKSRVSNQIREIGFLSREVRELQHNRDELVCLRMLKFPEYEVENGGVSTLRAYSIFRDAGVQSRYLFKIYKSLNIKYGKAEFLPLKQRNWNPIEYELLRQSRSEENLYLD

SEQ ID NO: 818 - protein, 481 aa, Alloteropsis cryptic virus 2
MSGFRSALFGFNFTNFASDFEETSMRHTHVVRREHAVTYVDEYALEHIRDVDEKAYDHYLKGWSRSYYLPEKHLEAVMSYASPNFPASRLNVGLYNQAIQVIKNEFRSLPRVRAFDVLTELDQVPYKQSSAAGYDYAGAKGPIGGENHKRAISRAKAILWSAIKSDGEGIEHVINSSVPDVGYTRTQLADLYEKTKVRQVWGRAFHYIILEGVVAYPIIQLITQNDTFIHAGTDPTFSVPALLSDVSSRCDWIYSLDWKSFDSSVSRFEINTAFDIIKELVIFPNYETEQCFEITRQLFIHKKVAAPDGKVYFVHKGIPSGSYYTSIIGSIINRLRIEYLWRMITGQGPMMCYTLGDDSLVGDNQLVTPSKIEVFANSHNWYFNAEKTEYSRVPEFVSFLGRTYRGGMNVRDLKKCLRLLTYTEYPVESGRISAYRAKSIHEDSGKLSQTIGRVAQRLERHYGMASEDEVPSYFRRYVPFM

SEQ ID NO: 819 - protein, 571 aa, Alternaria alternata partitivirus 1
MLLSEIPNVYQRALALERRLRLRELYPEGIIPYLARQEYAGSIAGPRGPSATVAPSVTTSFIAKAPLSTYSKPEYTLECTETMQYLGKMDHYAFNNSVPKFDPWFRHVLKSKAPDVVLHLEETYQRDPCTPERVMKFMKLFDRRWKRMPTGNVMKQAKEIVSEMFSKVGKVDPIDFNYAGWHEILPHLDMSSSPGLPLRREYATQGECLGHIYDKTKRLNHFAKFLHPGAVRAPPCMIGLRPGLIKKAEIDEKIKARGVWAYPAEVKVIEMRYCIPLMKRFSEMFGKTPYPVGRNMTKALPFIIDHLLQDKKFGLVTDISKLDTSVGPDWIDWAFSQLKSFFDFGFTLSSERRDSNVFDFLHFYFKRTPILLPSGQLVKKAGGVPSGSGFTQLVDTLVTTLATVYSRLRMGHTKDQIFKMFVVGDDMATSVDHDFSIEEFSHIMGQLGFEINPSKVMFSNKGIELKFLGYSKRGGGLYRPIEELLQTAFFPEKYVGNPNRSRQRILGQSIAAGLSNSFFDKCNYWMEELVTLSSTLDPDEVFIPQKRWMRNVLSIDEMPKSANVYDLFHLV

SEQ ID NO: 820 - protein, 509 aa, Alternaria dianthicola partitivirus 1
MSLSSDENTTDLEDVLATVELFAMSDPSARSARRHRAAGAFTALPGLKEIARYGGYSVYRSPQNTDPFIRQTLKLFDPDLYGNIYGFTRRPTGVEGMYKSLNIFGEERKEFSDLTVSQRVAMKTAIGKARSAFKLINKHEPLDWHEVGQFMKRDTSAGVSFPGKKKGDVLPQIYTEGRWQGHRMKQGGKGRFDPRKVRFPPCLATQRGGLSEVTDPKTRLAWIYPAEMLMVEGLYAPVMYREFEKMPNSPMLIGKSSQRLFTEWVAGARDGMKLYGLDFSKFDSRVPAWLIKIAFDILHSNVDWLHWRGKPTSKRSRQKWRNVWDGMVWYFINTPILMPDGRMFRKFRGVPSGSWWTQLVDSVINYILVEYMAACQNVTIKSLKVLGDDSAFSSCVDMNLSKAADDAHAVGMVLSVEKSDVVEDPTQLKLLGTTYRNGHAHRPREEWFKLALYPENEVKDVETSLSRLIGLWIGGGMWDTHFSSFMHYTSSVLTPVLVKAGSQRIKDVG

SEQ ID NO: 821 - protein, 536 aa, Alternaria tenuissima partitivirus 1
MSLSSDENETSIDDVLATVELFSMTDPSARSRRRHREAGEFTALPGLKEIARYGGYPVYRSPQNTDPFIRQTLKLFDPDLYGNIYGYTRRPTGVEGMSKSLNIFGESRREFSDLSQTQRSAMKTAIGKARSAFKLVSKHEPLDWHEVGQYMKRDTSAGVSFPGKKKGDVLPQIYTEGRWQGHRMKQGGKGRFDPRKVRFPPCLATQRGGLSEISDPKTRLAWIYPAEMLMVEGLYAPVMYREFEKMPNSPMLIGKSSQRLFTEWVAGARDGMKLYGLDFSKFDSRVPAWLIKIAFDILHSNVDWLHWRGKPTSKRSRQKWRNVWDGMVWYFINTPILMPDGRMFRKFRGVPSGSWWTQLVDSVVNYILVEYMAACQNVTIKSLKVLGDDSAFSSCVDMSLSKAADDAHSVGMVLNVDKSDVVEDPTQLKLLGTTYRNGHAHRPREEWFKLALYPENEVKDVETSLSRLIGLWIGGGMWDTHFSSFMHYFQRAYPCPSEGWFTKDQRRWLEIVHGGRAPRGWTSKRSLFWRSIFYVL

SEQ ID NO: 822 - protein, 284 aa, Amalga-like boulavirus
QMKLKYDYYIESDFGNFDAHCTKDDILLGTSILTSCFPNDKFHSRIKYFITSSLITKYIPIPPGIVIECNKGVPSGHPFTSLITSTINICYWCYIGYKIYGRNYPQYMDLVVCGDDANVFFVNNDKLSKIDLIIEEMGLVSDKILGKFQPCKEFDKLQNTPDFLKRFNDYGSVQWNIKKTLQKLIYPSSNRNKSEYLLIIENYILTAPHQEEFNKFLFEVYKYYCDDHEKIRILERNFEKSSEEYSVPNKILSGYIYEKNTINRNLIFKNKIPVNCIFFIYITT

SEQ ID NO: 823 - protein, 552 aa, Amalga-like chassivirus
MNSNWNSIPSELRDEYINQLINYRVVISGSFTTNQQSFIDMSNGNDNSNKIKAEEYLEYVLLTDLYGLKLAVVDKDITPDLLKHVYLNSDSFPGIMTENYFGRERKQTIQFTLPIAEQLLEVIKNKSVKYCGLWKILGREKDVKLTPEGVLKGTRPVLAPEELLNLIGGLIGQLVTLGLRSIDDNLFFIGKSFERKAFESFYENNKWFDVMCSEDFIGFDKFVDRELILSACAIIRSLLPEDKQYDRIMYFLATSLIHKHVVAPPGVIYEISNGLPSGHPLTSLVGTLINYIVWNRILCKVYGGSHDINTGKPNWKSRFCGDDAQHLLKYISNLANKIERAFKDDCPLSIEPLQQNFYPISSRCPEFNAKFLKRCVNSDGMVYWERASIMKKLLYPPIEKKDYFEMREWVNHWIEAAPGDLAMNDLLRGYLMFIGIKPLGEVFKKEPVKLRQSLALNILEEVTLRGLLRVGTERWESTLVVSKPRKNVQACYLPLVKTMIPTRDIQTLALTSIMDSRQYLKYIQDPVTRELLSGIIPSIQRSRPPPRLRKPH

SEQ ID NO: 824 - protein, 562 aa, Amalga-like chaucrivirus
MPALQISDLDTISVNPKAHPGYFTKMFFGDKREDTIPYSIKVSRQIFNHLKTKRFKWQGLWTLGGRSKDIKLTQEYTEEIGTRAIWIPEEPLVPLSLIVVQPFTKYLQNIDRHCLFVGKNFSVKENKWFSRLNSIYPWAMRCDWTLFDAHVDREMILAAMSIIRSCYPNDRFHTRYFSFLTDTIINKNLVVPPGFIYEFNSGMPSGHPLVTLVNTLVNYLVFVKILQKVYGKGKVAERCYALFSGDDSRFFLQMHPNLFKIDDIIRNTTSLETDSVVKSLEPAFSRDYEEQDVRFLKRYVNSFGIVSWHTSSMLRKFLYSDKKISGIFTSKRWICSLLYAAPGNSKLTEFFKKYLKFLEKKDHNFVKLSHNNKKNAVKYISESLLEAESVGLFAQIASEKQISSKDKMLVENFMENNERVTISKMYNRVDDEISSALFVLQGLLSTGGRFSAQCFDTSISVLSNKLEDPKLKLIPKLRQSFLFRKYKLSQLFRVLGKRAVVPKSLNELINDWEGPLHNEMLSLLYDLFKEPRTLLGANLYNPLGRLTRQGVLGELKSIHDTS

SEQ ID NO: 825 - protein, 716 aa, Amalga-like dominovirus
MDLVSFIQSSFSISFRKKTYFPFIHRLRKIGFYKLPTFCSENHMSYIKYSYKKFKTYGGPLNESSVCKLIGATPNYVGFVPSRRRQMNYRFARFLSNTQMSDEVRKVLLTPRHTWTGGYDSYRHVLNEFTKPSEFNYTVEQVLDILEQEDFPWLRLPKMDFPKVSELENLYVNPSAHPGFFTRAFFGETRRETLSTSIHVARAMYNHLMNKPLKYQGLWTLGGRSKDVKLSLGYTEDVSTRAVWIPEEPLVLLSLLIVQPFTRALQKISGGCIFIGKNYDFSEAPWYSKLDDLYDVSFKSDWSLYDAHVPNEVILAAVSIIRSCYPDDRHVTRFFSFLYDTIVSKNLVVPPGFVYRVDKGMPSGHPLVSLVNSIANYILWVIILRESLGKGKVSSSTYGVFHGDDSKIYAKFTKNLYKVDNVIRDKIHMPCDPVISSMCFLSRHSIDRPHVPFLKRYVDDYGISCWYAPSFIKKFIYTDKDISGLHSKMTWFFSNLVMAPGNDYLAGLFYDFFRAEIRHAYRGDKEKVDYELEQFDHRFRNTYELGLKHQMCDKSIFSVDSHVFYDNFYQGAVRVHISKVLRSSAALEFSGNSLVQGYLLFSDTAVDRGLYELRKKFNSFLYRERLKPLAKRVLPSVLERTGVSKIVKYFEINEMFLPGLEWAKGRLVDPTYTPVFEYLAALSIQEGRVKDARKVPKNWNNFLKNWSTFKFYYDSS

SEQ ID NO: 826 - protein, 506 aa, Amalga-like lacheneauvirus
MAQGNDNSNKVSAEEYLSYIISNDLYNLHLHVIDHEITSDLLKFVEVNPDSFPGIMTEHYFGSSRFQTLPNTLVAAMELHDAVMQKPTKYCGLWKVLGREKDLKLTPEGVMKGTRPVLAPEEILTLIAGLYGQIITIGLRKIKDNPFFIGKSFENRSVESFFEGKAEFDFIINTDFVGFDTTVDRESMLCACAILRSLFPSSREYDRMWFFLATSLINKQVVFPPGIIYEINNGLPSGHPLTSLVGTLVNYIQWNRALTRAYGEKAVSSTRYLWKSQYCGDDARHLLVRVDKILDKINKIFKEEQPCIIEDVHDSISPLPSSLIGYNSKFLKRCSTYDGLVYWDHKSIIKKLMFPSRNFKSYFEIQDWIYNWIETAPFDYEMNKFLTDYLLYLLRDFYSETYKEIPFFKRRTLITEDLNDIIIRGYLRIQTNMKFFMLNIHRPVRRKVVSEMVSNVTPVNYPETQLILLTLGVDAFQILKRIDENALRHKILKVREQLIRRTRKPP

SEQ ID NO: 827 - protein, 477 aa, Amaranthus cryptic virus 1
MTTRTLNGYEYTNFTSELEEIGRFHLHQVRREPGVTYRDEFVLKELNDTHPILYEQILEGWSRSYYSGEAHLNAILEYGNPNITPTLEDSEIYQQARTNVAELLRSLPRARAFDVLTELDLINYESSSSAGYDYNGAKGPIGGPNHTRAIRRAKATLWSAIRDEHEGPGHVIRTAVPDVGYTRTQLTNVREKLKVRGVWGRAFHYILLEGTSADPLLQAFKQGTTFLHIGSDPTVSVPYILSETAGTCQWLMALDWRAFDASVSRFEIHTAFDLIKERIDFPNTETESCFEICRQLFIHKRIAAPDGKIYWSHKGIPSGSYFTSIIGSVVNRLRIEFLWLKLKGRSPKVCYTQGDDSLIGDDDYISPDDLAQIAEPLGWTLNAAKTEVSRMPEYVSFLGRTIHGGLNQRDLTKCIRLLVFPEFPVETGSISAFRAKSISDDSGGTSRILNDLARKLRRRHGVAPEEAVPKRFKLYVP

SEQ ID NO: 828 - protein, 480 aa, Amaranthus cryptic virus 2
MSTINISGYEFTNFRSDFEDLQQTHTEQVQREPETTYFDNFAKEELLDMYPELYRQHIEGWSRSYYLREKHMEAIMQYRIPNTPLNRLDQEVWQEAIEAVKNELRSLPQSRAFSVIDELDQIYYVQSSAAGYGYIGPKGPIGGTNHMRAIRRAKATLYSATAPDGEGIEHTIRESVPDVGYTRTQLADLNEKTKVRGVWGRAFHYIILEGSSARPLLETIMQGGTFMMIGCNPVADVPLALSEISSNPQVSWLMALDWSQFDATVSRFEINTAFDILKEKITFPNFDTEMAFELSRQLFIHKKIAAPDGHIYWSHKGIPSGSYYTSIIGSIVNRLRIDYLWRFKFYNSPIVCLTLGDDSLVGTEEYWDPNEISQLSNELNWNLNPSKTECSTMPSGVTFLGRTSRGAQNERDLKKCLRLALLPEYPVTDGRISAFRLQSIYEDSGASSSVLLRIARRLRTKYGFPSPDEIPRLHRPYTFM

SEQ ID NO: 829 - protein, 734 aa, Amaranthus cryptic virus 3
MPFNPVRNYLAERLARVKEEWKTFESTRRNPSLTLQRIQDADIRRFYDRVRFDPMNEVKTKMFNKEYSTLVEAFRLRNDDRHQPYELHQPIPQDAAPIPDSRQPAPGIKLVPLMYHYGRVVHPNPMTSKSVRTSDDAELPPLYTYGDIDYGESIDPKLYNLILNRYPEYLFIVDKYCRPAGTTDATFRDFNKEQIPIEQVMPERKETILRLVKHFLDVTPYRPVHFVDTQYCKTPLATGTGYHNRYSFKQRAHAKYSHPPEYASRPTSKGYFYNATYENARTLIHKIKDIGVPFDVGPDINEEEMINRLNNFFNDYPTLLFTRNHISERDGVLKVRPVYAVDDFFLLIELMLTFPLTVQARKPSCCIMYGLETIRGSNHYIDRLAKKYSTYFSIDWSSYDQRLPRVITDIYYTDFLRSLIVINQGYQPTYEYPEYPDLDEHKLYKRMDNLLHFLHLWYNNMTFLSQDGYAYRRTYCGVPSGLYNTQYLDSFGNLFIMIDAMLEFGFPPEKILEFQFLILGDDNTAMTAMDIEIVDPFIKFLEKYALKRYNMVLSLTKSLLTTLRSRIETLGYQCNYGNPTRNVHKLVAQLCYPELGLRPHTMAARAIGIAYASAGQDITVHSFCQDVYNIFRSDHRPDPRTTLFLHRNVFHNLEEGIPNLETQVVPPFPSLYEIRQHYSKYQGPLSYDPKWNYAHFVHSPDTVDPFAKTMMQYEKEMNLPVRQAPTFPTVVPST

SEQ ID NO: 830 - protein, 200 aa, Amaranthus cryptic virus 4
MPFNPVRNYLAERLARVKEEWKTFESTRRNPSLTLQRIQDADIRRFYDRVRFDPMNEVKTKMFNKEYSTLVEAFRLRNDDRHQPYELHQPIPQDAAPIPDSRQPAPGIKLVPLMYHYGRVVHPNPMTSKSVRTSDDAELPPLYTYGDIDYGESIDPKLYNLILNRYPEYLFIVDKYCRPAGTTDATFRDFNKEQIPIEQV

SEQ ID NO: 831 - protein, 616 aa, Ambrosia cryptic virus 1
MADIPHMYDKLPQWFIAPTNLEHVGDYSLPPGIMRVNSVAITNHKATLDRSFSRYLYEHEINYITSEHRRSDIDYDSILEDFLSGDIPPFEIPFDSHVENGIRCMVQAFQPPRPCRPTHILDVQSSYPYKWNVNAEPPFSTDDYFLKTRKTFGEFIQQHEYEHIDKDDFFRRHPNYESHDLIRTVVPPKFGYMKSTIFTWTRRWHHIIKSGLKNDTGLATTGYFYNRFIFPMLLHTKTAIVKKDDPNKMRTIWGASKPWIIAETMLYWEYIAWIKLHSGVTPMLWGYETFTGGWFRLNHLLYCGLLKKSFLTLDWSRFDKRSYFSLIYRIMIATRNFFTFEEGYVPTHAVPSHPNWNRDKADRLERLYIWTLENLFKAPIILPDGRMFRRRYAGIPSGLFITQLLDSWYNYTMLATLLSALGFNPDLCIIKVQGDDSIIRLSTLIPEEAHVKFMSKLVELAEYYFNATINVKKSQISNNLNGCEVLSYRNHNGLPHRDEIAMLSQFYHTKARDPTPEITMAQAIGFAYASCGNHKRVLWVLEDVYRYYKDQGYTPNRAGLSLTFGESPDLSMPEIPLDHFPTVNEIRRYLISSTYINEAQNARTWPLSTFICKPAE

SEQ ID NO: 832 - protein, 484 aa, Ambrosia cryptic virus 2
MSVSTINIRDYRFTQFSSDLERLNQRHSEQLRRESETIYEDQFAKTELLDISPRLYETCIQGWARSYYSGDKHLAAIMQYATPNIPINQLNQAIWTESIEAVRHGLRSLTRVRAYSVNTELKSVHYIQSSSAGYGYIGAKGEPDGTNHNRAVSRAKATLYSAIRSDGEGIDYAIRESVPDVGYTRTQLAHIAENQLKVRGVWGRAFHYILLEGTAAKPLLDSFQRSNTFVMIGSDPVTRVPEILSKISDDGKWIMSIDWSQFDATVSQFEIETAFDILKAFIDFPDFDTEMCYEFCKHMFIHKKVAAPDGFIYWAHKGIPSGSYYTSLIGSIINRLRIEYLWRLKFDEGPNVCYVLGDDSLIAYDRFYDPNELAAEAFKLNWLMNPEKTEYSTIPNAITFLGRTVRGGMNQRDLKKCLRLLILPEYPVEDGRIAAYRAEAIAEDAGGTSEVLNTIAKRLKRIYGVALEHEVPIRLRRYQFAINM

SEQ ID NO: 833 - protein, 708 aa, Aplosporella javeedii partitivirus 1
MVLNNVRNYLAEKYARLTNEWKLFQVHQASPPDVLQAHKDSDLDRIYRSLRYDFTHPEIEEQYKMQANHFETIFNEKSEQQKFPAEFYLPRDLSTLPTNRIPPSGISALPYAFKAGQIVSATPEVPESGFHVDPRITRIIKHFYPDFMYYVDKYVRPLGTTDATVKDFFKTQTPCAPIDPSRRDLIIDLIIKKLDITPYLPIHFVDSLYDGTPLHTGTGYHNRPSFSINAHAVFSHPPEYKERPTSKGYYYNAFLESARSLIHYIKSTGFPFPTPPKDLHESLRQFFLERPTTLYTRNHISERDGNLKQRPVYAVDDLFIRIESMLTFPAHVLARKITCAIMYGYETLRGANCELDRLAQAYSSFFTIDWSAFDQRLPRVITDLFFTHFLERIIVVNHAYQPTYEYPVYPDLTADKMFQRLQGLISFLHTWYNNMVFITADGFSYVRHFSGVPSGMLNTQYLDSFGNLFLIIDGLIEFGFSPSEIDSIILFVMGDDNSGFTHWPLLRLQIFITFFESYALERYGMVLSKTKSIITAIRGKIETLSYQCNYGQPLRPIGKLVAQLAYPERGPRPKYMSARAIGLAYAACGSNVRFHNLCRDIYYEFLDDAADPEDPLTFKLMQEHLPGFLRIDESVRQQINLTEFPSIFDVREQVSQWQGPLPFQPKWNLAHFINQPDVIPSSAITMQQYRTQNAIPHPEIPALWTQQT

SEQ ID NO: 834 - protein, 598 aa, Apple partiti-like virus 1
MSIHPDTDPFTPIPGVDRLRKYNSQARSKRLAEVLSSLNRAVVKPATDAHNVSWLLDLGVSFKPEENRSVTGEDWAFESLRKYGKQPTTAGFSVGDGRRANLHPTTGSTGGDGTTQGSIVRARASAEDTRRSGSVQSKGPVPSDLRSPHRGVASGVRVDGVKAGAVGGPYSRAAYRAALSSVRRALGAVGGRRRVLSLEVVVDTLVHDNSFSSLPYLSSNDLAKAKGLRLAERIRSGERGFDPYLFGRRVQFGVRAGNGVVNPKTRLVWMAAIATTILGQSYSEPIQGSLARKRPFTWGLTSAERGAIISSMRGSHKFSYELDFSKFDACVPEFIIMDIFKLIAEKLDMTDVEEDCYWRYANDFVHSRIVMPDGYIYQVHQGIPSGATFTSLVGSLINLLVSNYSWFRLTGRTLSNEQLLVMGDDSLIMSDQCLELDDIALMAAELNFTVNPDKSGVRDNRVKADPSTSPYFVGHHWHKGRPNRPKQEVKKHIWFTERHHAPDKAWSLVRLGGFALSSKQGYEVLLELMGQRYQTRDVVALLSLYLSMVRHSASEIESGQWRVEWPGEIRRRIYAEGWEAPKFLEGKGLDALLYGDSL

SEQ ID NO: 835 - protein, 561 aa, Apple partiti-like virus 2
MNLPRAGVDSLGTYRCSAEARRTLQRLGTRVVVPVVDWYLWRKLRPHFPDLDPLKENRSVTATEWVAEGLGKFGCPVHSEQSVHEXXXXXXXXRANRNRATGPVRGPETSGRSAGLPGQANASNPDREGSPLSVGELDHRNERGWGYSQSSYQQAYNATRRMAGGGERRRKPLELDEVVASHIHMGHFSGAPFFARNEDCVVAAVDRASRIHRGTTSFDPFVAGRRVQFGPSGPKTRLVWMAPLATTLLSTRFSAPVHSGLARRLPFAYGYSSVEKAARISSLQSKYRYVYSLDFSGFDASLSNSLIRDAFSILNTHLEMNDDDEELLNRIIDDFIHTRLVTPDGDMYRVHGGVPSGSSFTSLVDSMCNLLVVMYTWIRITGRALTADQLWILGDDVIIADDHKMTMAMLAQAAAPLGVTVNAAKSSVTGYSRERDAEPVHFLGHYWISGRMHRPVRELVTRLVFPERWAKQSKARSMARFVSMMADAYEMLGIAQQVWPTADTWALISKLLLEIDEGDGEVLDMRYDLPGRLRFLAVVEQSLEEELSRPGVKLPLYGQTA

SEQ ID NO: 836 - protein, 573 aa, Apple partiti-like virus 3
MSTQFGIDNLGIYRTRNRKVRDYLTTLDREVVVPMIDRFLFQEVQSLGISLDVERDNKSVTEPEWFWKGLDRYACPVHESGTTSAGILCSCGKGDRSSRGGRGSGRANGSSRADTPGGVVRARKGEEVLGVVTRDDVRIPTTSNDGSGNRNHSRAGSRIDHAALRRALQTVRRAVLQKPGTITPLELDEVVEHHLRGDAASGLPYLGHNHDPGQKDRARHLGRRVLELDRGLDPYLFGRRVSHGPTGPKTRLVWMAPLATTVVGGMFSIPLQKALARVRPFTWGHRDAERGAIISEFDGRFRYIYGTDYSRFDSSVPAFLLKEVFALLREQLDLTEGLESVWELIVRDFIHTRIVGPDGNIHQKHRGIPSGSAFTSLVGSLVNLVLTEYVWIRSTGEEMPMNAILVMGDDALFGSDRFVSPQEMKRYAGELGFTLNPSKTGVTSGAGVRHTMEEWPHFLGYYWVNGVPNRPEDEIAMRMALPEHHRKQDQLLSNQRKVGYAMTCRQGYRMVLQLAGEARVMKACTEIMRAAKSDEPVKPQNLPGSLRQRVAVEGEVVSFADGNPLPILLGRIY

SEQ ID NO: 837 - protein, 585 aa, Arabidopsis halleri partitivirus 1
MKNTVVLEPLPSLARPIYGDTDPGRNPAYQSTVDHALRRLLTAEEFNIVVNGYRRSPWNEDALTADIEKLNSDYHHVNKDEHYYKAIEHTKKLFTPKEKLRPVHFNDLRHYPWQLSTSIGAPFATSEKWKDYINQKYDGKLKSRDFKDLFKETHGVSLEPYMIDRRLSKRNFYNEMFYINRINIHHIKDGWTTNPAGHDLRYWHTAHARQHLVEAGDEDKVRLVFGAPSTLLMAELMFIWPIQTSLLARGSSSPMLWGYETTTGGWSRLYNWAYSALPRFGAVATLDWSRFDKDARHTVITDIHDLIMRPMFDFNSGYHPTIINPRSNPDPQRLENLWNWMKNAILTTPLLLPDGTRLQFQHSGIYSGYFQTQILDSMYNCVMIFTVLSRMGFDLNSVAIKVQGDDSLILLSHSYTFLQHSFLTTFAHHAAVYFGSTLNVKKSELLPSLEDAEVLRYRNHGMMPYREELQLLAMLRHPERTASLSALMARSIGIAYANCGNYTRVHHICEDIHNYLKGIGVKPDAFGLPGGLRFRKNYLPSYEEIDISHFPTWLETVERLLDPSRPLLTNKHWPTTHFFGIPGES

SEQ ID NO: 838 - protein, 499 aa, Asiatic toad partiti-like virus 1
FYLVLQPLPTCRVLRQHFMFVYYYYYRYLLFHVKKVNPLQYSLSDMSTLQQVDKLCPYALSKEPHPVDQPALAAFQKLYPLAVPAVLDYSRGMYSPELHYSSLMRYARPLSDDARIRDQLSNDLTLAYALQHAKNQLRAAFSVTATSASRLDDVPFIGKSVAGYGYIGSKADNYLLARSRATANLANFRKFGSALRHTPSLAFARCQLAPISDPKVRHVWATPFHQILLEGCIAAPILESLTRQPSPFAIGLNPFKDLPHTLSSLLEVTGFVACIDYSAFDSSIHPWWFQQFFDFIKEAVTFPNNFTSLLPDYCLDALSRTPVLMPDGRLWLCTSGLPSGSYFTSLIGSFVNLVLCFYLQLKIFKKVTPTNVLGDDSVFYCPTLLDLNQAQALLAPFGFTINTAKSLVTNSLPVVSYLGHNIRGSSLSRPEWKALLLAMLPEETVTDPSESLLRLLSINVDCGYTSSALLRIINQLIEDNPDVRIPPGFGNPPYFAHSV

SEQ ID NO: 839 - protein, 423 aa, Asiatic toad partiti-like virus 2
SVPLQMTTVTYVRRLPSFATRTTEANEDRFVREIIEHRLPNIITELRSYSRGLYSLDLHYASLSKYERALAVEDDIHARLLDNPCLATALYRAELELESVFSVTAIPANQFDSVAYVGSSSAGYGYVGNKRDNYLLARRRATTNLANYRRHGPSMMFTPMKAYSRTQLALRSHPKIRHVWGVPFHTILIEGLTAQPIIENILRNPCAIYIGKDMFKTLPFDARELLKDGEFLNCLDISAFDSSVNQFFIDHFFDFVERCVTYPDEFTRLSLDYTRAFYRQRPILMPDGRLYHCSTGVPSGSYFTQLLDSYVNLILMYYVQLKLFKNTMKTYVLGDDSLFVSPTPATAQDYHSLLAPLGFTLNIEKSLITNDLSIAMFLGHNFRGTRLTRSDFTLACLALYTEDPVHSPDESFIRLQSLFYDSA

SEQ ID NO: 840 - protein, 247 aa, Asiatic toad partiti-like virus 3
LAIIIPCLESHPMQYSLSDMSTLQQIDKLCPYALAKDPHPVDKPALAALQKLYPSAVPSVMEYSRGMYSPELHYASLMRYARPLEDDIRIRAQLTNDLTLATALNHTKDQLRAAFSVQAISASRLDDVPFIGKSVAGYGYIGSKADNYYLARPRATANLANFRKFGSRLRHTPSLAFARCQLALISEPKVRHVWATPFHQILLEGCIAAPILESLTKQPTPFAIGLNLFKDLPYTLSSLFEVNGFAA

SEQ ID NO: 841 - protein, 571 aa, Aspergillus creber partitivirus 1
MNISHIQNVYQRSLVLERRIRLSELFPTGLIPYLKKLELSGVIATPQGPSATKAPAVTTSFDRKYPLELYSKDDYVLRPQASMTYIGKMDGYNFNQSIPKFDPWFRSILKEKSPSMSQYMEETFIRDPCTPERVMQHMSLFDRWWKRKPNDILMKRAAALVKELFSPVGKVDVIDFNYAGWHEILPHLDMTSSPGLPLRREYTTQGECLGHIYEKTKRLNHFAKFLPPGAVRAPPCMIGLRPGLIRRDELDTKVKARGVWAYPAEVKVIEARFAVPLMKRFSEVFGKTPYPTGRNMTKALPMLIDHLLNDGKHGLVTDVSKLDTCIGPDYIKWAFALMKDMFFMGFTESSAKRNECVWDFLEYYHTRTPVLLPSGQLIRKAGGVPSGSGFTQLVDTFVTVLITCYGLLEQGISEHEIKGRIFVVGDDMATAVDSTFDIERFTRILSTLGFEINPTKVMFSDRAIELKFLGYSKLGGGVFRPDTELIQTAYFPERFVGNVDRARQRILGQTIASGLCNGFLSKVNYWMAELCNQVPTDPDEVYIPQKRWMTHVLGLDSLPSSAIVFDLFPLV

SEQ ID NO: 842 - protein, 542 aa, Aspergillus flavus partitivirus 1
MSKPSEPFTAFPFDYPGKSEVAKFLESNPWTKPFRHLTHVGHTGQKRGVLQNTQRYDPFVNEALRHFDNDLRKSLKGFTRTPGDETKLRQALDKYDRPSLSFDNIFHGNDKLRACYEQAYREVFNEFALDRKVVPKFPTAVDLVMDSSSGYPHFQKKSEIRDQILHEGRTWLHHAKSKDFHRLPLLPCSVGVRGALSPEDDPKTRLVWMYPAAVTVAEGVYAQPLIKAIYREKAHLLLVGEETRFRLSKFLSLINEDKHTYGVGLDFSAYDTFPCSDLSRDAFKIMKQNLAFGSYWDPENGTITAGSDDLRNFERVRSRAEHGYDNIMEYFIHTPLILPNGRVVRKHTGVPSGSHFTNLVDSIVNRLLQKTFGLYTGRSLRELRTNGDDSAFIVSDTYVKNILEDASEFFKVWRMTVKPEKSVVAGTPGEMHISGTTWEALRPTRSTKDWLMMALYPSTFVKDANMAFQRLLGIGIAGAFYDAKYCQFFQYFQTGYDCQHGPNLLSWKRLRWLEPVFGINDLPKIYKQKSSVTRIRTLLWAP

SEQ ID NO: 843 - protein, 566 aa, Aspergillus flavus partitivirus 2
MSNLKLIGRFPQLASPIHPGGGIQNAVLLSLKRNVSTDTYDKIVNGYRRSTFSQEALIDDYLKGDVPKHKIIKDVVYYQALDHVSQLFKTPQKYRPVSFPDLRFYPWPTSSSAEAPFSSSKKLRSDFQKLYELGLVQSPRLTFHNLYNHIFNYNRETIHRIKLGMKTDYHGRDARYWNTAHARSHLVESHEDDKIRMVFGVPKLLLQAEAMFLWPLINHLVNLDGNGPMLWGFETLKGGWAKLYNWFHTQRPKARTFLAFDWRQFDKRAQFEVIDDIHDVLKSNIDFEHGYMPTKDYPETWTHPQKLENLWNWMTNAIKHTPDLLPDGRMYERQHAGIASGFFQTQLLDSIYNAIMIFVSLIKMGINISTTGLKVQGDDSIVSLNEFIPKQVHQSFIDQFANHADRYFGAVLNTKKSKMGNTLNGLPVLGFTNDNGYPTRDKEALLASLLYPERNTDQPRLMARAIGIAWANCGVHSDVYEVCSDVYKRFQDEGFSPKMSGLPDIVKSQHLLFSRPAKDEKIPEEFPTFFETIRHVQEINFRSQSQKQLFWPTEAPGLTNWFISEY

SEQ ID NO: 844 - protein, 542 aa, Aspergillus fumigatus partitivirus 1
MEDYTQDPTQHYVLAKGSHLIDALQLRPARSGKSSTTSYDVLPSNFESDTLREIARYGGYSTYSSASNTDPWVRESLKIFDRDQYEAIRGFTRRPQGTPGMYESLKKFSTEERSTFWSLSPQQRTSMRRAIGKAKRAFKLPYKREPLDWHEVGQFLRRDTSAGATFMGQKKGDVMEQIYHEARWLGHRMKQDGIGPFQPHKMRFPPCLAGQRGGMSERDDPKTRLVWIYPAEMLVVEGFYAPLMYRDFMNDPNTPMLNGKSAQRLYTEWTCNLREGETLYGIDFSAFDARVPAWLIKAAFAILRQNVDFSTFRGKPVNKRDAQKWRNVWDAMVWYFINTPILMPDGRMFRKFRGVPSGSWWTQMIYSVVNYIMIEYLADCQRVEIRNLRVLGDDSAFRSGDQFDLDVAKGDAEPTQMLVNTDKSGKSKDPADFKLLGTTYRCGRVHRPTDEWFKLALYPESSVFSLGLSFTRLIGLWLGGAMHDATFSRFIEFFQQCYPCPEEGWFSKDQRRWLEIVYSGKAPRGWTTKKSLFWRSIFYAYG

SEQ ID NO: 845 - protein, 573 aa, Aspergillus fumigatus partitivirus 2
MLLTEIPNVYQRAVALERRIRLRELYPEGVVPYLAKQEYDGAIAGPHGPHGSVAPSVTTTFQAKLPLDQYPDRKYTLECKETMIYLGKMDGYPFSSSIPKFDPWFRKVLKDKDPAIVKDLEDTFMRDPCTPDRVMKHMSLFDRTWKRMPTGRLMSRAKDIVAKMFEPIGKVEPIDFNFAGWHKILPNLDMTSSPGLPLRREYQTQGECLGHIYDKTKRLNHFAKFLHPAAVRAPPCMIGVRPGLIRRDEYNEKVKARGVWAYPAEVKVMEMRFVQPLIERMSLNFMKIPYPVGRNMTKALPMLIDHMLHDKKKGFVTDVSNLDASVGPDYIDWAFSLMKTWFNFGITQSSETRNANVFDFLHYYFKRTPILLPSGQLVKKAGGVPSGSGFTQLVDTLVTILATVYTLLRMGWDEDQIIKGYMQVVGDDMAVSVPRDFDPEEFVYLMGSLGFTINLKKVMFSDKGIELKFLGYSKYGGSVYRPLDELLQTAFFPEKFVGNPERSRMRIAGQTLASGMTNAFFSKVNYWMEELVSLATELDPDEVFIPQRRWLRIVLGLDEMPSTTLAFDMFPLV

SEQ ID NO: 846 - protein, 582 aa, Aspergillus lentulus partitivirus 1
MSHNITVPSTMLLTEIPNVYQRAVALERRIRLRELYPEGVVPYLARQEYAGAIATPVGPSASRAPSVTTTFQAKLPLDQYPKQDYTLECQNTMIYLGKMDGYPFSQSIPKFDPWFRHVLKDKAPEKVRDLEDTFMRDPCTPDRVMKHLSLFDREWKRMPTGRLMTRAKEIVAKMFSPLGKVEPIDFNYAGWHEILPHLDMTSSPGLPLRREYLTQGECLGHIYDKTKRLNHFAKFLHPAAVRAPPCMIGVRPGLIRKDEFETKIKARGVWAYPAEVKVMEMRYVIPLLNRMSTMFLKIPYPIGRNMTKALPMIIDNLLRDGKHGFVTDVSNLDASVGPDWIDWAFSLIKSFYNFGITQSSETRNENVFDFLHYYFKRTPILLPSGQLIKKAGGVPSGSGFTQLVDTMVTILATVFTMLRMGYSENDILGKIWTVGDDMATSVPEDFDVEGFVKLMSYLGFTINLKKVMFSNKGIELKFLGYSKYGGSVFRPLDELLQGAFFPEKYVGNAERSRMRIAGQTLAAGMTDAFFSKVNYWMEELVSLATDLNPDELYIPQKRWMKMVLGLDELPRTTLAFDMFPLV

SEQ ID NO: 847 - protein, 573 aa, Aspergillus nidulans partitivirus 1
MQHQLETIQNVYQRAEALSRRIRLRALFPEGIVPYIKRLEYAGTIASPTGPKATVAPPVTQSFDKGFPLEMYPKQDYVLYPKVSMRYIGRMDSYAFNSSIPKFDPWFREVLKEKAPQVSKDLEDTYMRDPCTPERVIAHIQLFDRAWKPMPTGTTMKRADALMKRLFKSVGNVDPIDFNYAGWHEILPSLEMSSSPGLPLRREYATQGECLGHIYDKAKRLNHFAKFLKPHEVRAPPCMIGLRPGLIRQDELETKIKARGVWAYPAEVKVIEMRYVIPLLKRFSECFGKIPYPIGKNMTKVLPMLIDHLLNDGKFGLVTDISKLDTSVGPDWIDWAFEFMEDFFFWGITKSSVIRNRNVYRFLQYYFKRTLILLPSGALYRKYGGVPSGSGFTQIVDTLVTLKLTIYALLVMGYDEEDIIGKIFVVGDDMATSVSSDFDVAHFRRIVGMAGFEINEKKVMFSNKGIELKFLGYSKYGGGVYRPIEELLQTAMFPEKYVGNADRARMRVMGQTIASGLCNGFFSKCNYWMAEHCSLKPPDPHEVFIPQKRWLRNVLGLEEIPQTLVVFDIYPLV

SEQ ID NO: 848 - protein, 542 aa, Aspergillus niger partitivirus 1
MSKTSEPFTAFQFDYPGKSDVVDHKKINPWAKPFRHMTVIGHKPYKRGVLTNTQRYDPFVNEALRHFDNDFRKSLKGYTRVPGDENKLRESLDKYDKPTKTFDNVFYKDDKLRASYQQAYAECFDEFRLDSKVTPKFPTAVDLVMDSSSGYPHFVRKSEMKDQILHEGRTWLHHAKSKDFHRLPLLPCSVGVRGALSPEDDPKTRLVWMYPAAVTVAEGVYAQPLIEAMYKQKAKYFLTGVESRSRITRYLALISEQKGEYGVGLDFSSFDCFPVVDLIYDAFKILKQNVNFGSYWDPENGVVTAGIDDLRDWERVAKRAEHGYDNLVEYFVHTPIILPNGLVVRKHHGVPSGSHFTNLIDSIVNRLLQKTFGIYTERSIRHLATNGDDSAFIVSSTYATNILEDAAHFYKRWWMTCKPEKCVKAGTPADMHISGTKWLCSQPTRTTAEWFQMALYPSTFVKDANMAFQRLLGIGIAGAFYDATYCQFFTYFQTGYDCQHGPNLLSWKRLRWLEPVFGIEDLPKIYKQKRSVTKIRTILWAP

SEQ ID NO: 849 - protein, 539 aa, Aspergillus protuberus partitivirus 1
MEDFTQDPTTHYVLAKGSHLIDALHLRPAKDRSTTSEDVLPPGFQSPDLAEIAKYGGYSTYSSNSNTDPWVRETLKLYSREMYEEIWGFTRRPQGTPGMYKSLEKFAGEKCSFSKLSGSQKASMRRALGKAKRAFKLPYKREPLDWHEVGQFLRRDTSAGSTFMGYKKGDVMEEIYHEARWLGHRMKQDGEGTFNPSKMRFPPCLAGQRGGMSERDDPKTRLVWIYPAEMLVVEGFYAPLMYRDFMNDPNSPMLNGKSAPRLYTEWCCNIRDGETLYGMDFSAFDTKVPAWLVYAAFDILKQNVNFATFGGKPVSKLEAQKWKNVWDGMVWYFVNTPILMPDGRMFRKFRGVPSGSWWTQMIDSVVNYVLIEYLADCQAVEIRNLRVLGDDSATRANDQFDLERAKLDCEPTGMVLKPEKCDRTKDPTQFKLLGTTYRNGHAHRPTSEWFKLALYPESSVLSLDMSFTRLIGLWLGGAMWDKMFCGFMDFFQTSYPCPEEGWFSKDQKRWLEVIYSGKAPRGWTTKRSLFWRSIFYAYG

SEQ ID NO: 850 - protein, 537 aa, Atrato Partiti-like virus 1
MNKAQMQEFLKPLPPGPGFKFNYQPSRLDRNALYAINRVFDPAKVGEVRSKYHRAKLNLDDLRTDLLEYKRTKFPRSHTDAYYAIYESVDRDIFGDVKIIPLTHGAVAASDKIPKNKSPGLPYKVLGYNSKAEALADPDTLPRIRKLWYAIERGEPVELPDVACYARAQICSRDKNKIRATWGYPLDVYLTEAQIFYPLLDQLKNRPQPKIAYGIEIGTGGMHYINEMAKFYSKANFLIGDWSRFDKSVPAWLIRDAFKMIARHVDFSQVQSVCGSLWPVRESKSRKRFSAMVKYFIDTPVQLSSGERFLKHGGVPSGSCWTNIIDSVVNCLVMRYLTYQLTGKLPVDDIYLGDDSFLVLDGPINLEELANLAYKEFSMTLNVEKSFQTSNVTNIHFLGYYNLYGVPFKPVDTVIASTLYPERPVMSKFETITRMIGQAYSCFEPEDAKKFFQASKILQDEIEGLETSMIEEFTESHPHWFKYLQTLGISTRRGLKIPTAMPYDIIWLTAPMAPRRTWKPQTHDLVHLASVAYKNSL

SEQ ID NO: 851 - protein, 482 aa, Atrato Partiti-like virus 2
MSSLHRSTITYESMVEDLYAYDREPARCVRDDVYYAVLNSIREDFQSFPTIVPLTMGAVPQRPDFPGQKSPGLPYKLQGFRTKQDVIDAGLLHEINRDWQNIGFKKRRVDLPDVCLFARAQIAREGREKIRATWGYPISVYIEEGRFFYPIQDTIKARKHDFPIAYGFEMAHGGMRVINELLGRNPGAKYLCLDWKQFDKTVPPWVIRDAFSILAEKIDWGHVEDVEGNIWPVAPEPSKRRWKRMVDYFINTPIRTCKGERFLVSTGVPSGSCWTNLIDSIVNALYVRYAVYQTTGSLPLDEMYLGDDGVVIASGVINLKDMAEVCSEKFGAILNVDKSFVTTRKENVHFLGYFNQAGYPFKNQDFLIASFIQPEHTRKDALDACAAGLGQLWSGFDPCYANTWRKIILDVAAKDDLSLCQVVTHLRSNSHRHKYLMHVGLDARTLTIPAPNEDGLILDVLPSLFLGKIPRRRRYNLATLFN

SEQ ID NO: 852 - protein, 472 aa, Atrato Partiti-like virus 3
MYYVNRVRGFGMRPNNPEPSPYALALFGKEGALSARRSELRFKLIKNDMLKMGSNSTVIKDDLFGYVVRAARDKFKVNSVNPIHLNDIFGMDLEIRKSSPGLPWQPEYKTRGEVMDCPAAQNKIRWFWHRIKADEHLTPDDCKVLYRAHIQRDEPKIRAVYGYPTAITLMEACFAVPLINEYKLGTTPIAYKYDMAVGGAWKLRSRIKQYQHFGCVDFSGFDKTVSAQLIKIAFAILEQNLDLRRYQGRGVPDSRRLYRAWDYIIKYFVETPLRLCNGERWKKKAGIPSGSYFTQLIGSIINWILINYAYLRRYGRFADECFVFGDDSVISSHSPFSLEALSHELGLLGMIVNVEKSIYTSSVDEVEFLGFKIEGGFPCRNLDRWMEALYHPEWPDQDWDMFASRALGLFYANCGVHGEFAQICRNIVGMRSFTVRLPRDTERMLRHLGVQIADCSPILPLPEVLVHRLMCM

SEQ ID NO: 853 - protein, 456 aa, Atrato Partiti-like virus 4
MIKLSSFKGFAQRHTRAEKTPYLGFLNDVPEYLRSEISLDGIRRDLFQYHNSAKRPTDPVFWKAVAASARRFRMQPVHPRHLNDIINDNTLDIWSSSPCLPWSQYGYKSKKDVINDPACVRSIRTFWSRIKQGYHITAPDSMAHVRSHLIKRGEPNKLRAVWGYPLTMVLGEAMFALPLIAACKKVTPIAYGYETAVGGMRKIVHESAHCKYFSALDFKSFDKTVPLWLIDIAFDVLESNLDLTRYQDYGVPDTTALYRCWDYIKSYFKYTTIRLANGERYKKIVGVPSGSYFTQLIDTIVNAILLEYAFMKQGIEIDYVKILGDDSIIGSMMKLDLDDAQDLLSQLGMTINAAKSGQSRYISELEFLGYQICSGYPIRPYQKWLASLAYPEFPDKTLDDFMSRALGLGYANASGDDRFDKLVRFILSWKYKFKITFGRNFDRWLRSQGIEHMDVA

SEQ ID NO: 854 - protein, 518 aa, Atrato Partiti-like virus 5
MPPAHKGFSYDMSLPYVDFKAVRACYAAGCGDTCDKVLFHSRRSRVTTEYLFDNVLNYGYETPPRLKDDIYARCLDELRAEFKVTETITPLSLKEASQQIPQSTSPGLPWITMMPSAKKGEVLEKHFDKIAKDWEYIENGHRKYPLPDCAAFGRSHISGKDVNKVRAVWVVPLTVIAAEARFALPITDLLKKQEIGIHTAYGCEMMKGGMSWIHQQSLRAKLVDPGTKFLMTDYSSFDSRVPAWLIRDCFAILREKFKLTQAEQEVWRRIVSYFINTPIQFADKRRLLTNHGVPSGSMWTNVIDTMVNFLQTRYLVYGLMRTNPIYDIYFGDDGLIALPSWALINLNDIAKAAREKFGAIISPQKSYWTNILPNIHFLGYYNNNGAPFKSIESLIASFLYPQHVQDDWSYTLARALGILFASAGDKTIFKLCQTVYHMARQKDECTVTKAFSLVNTHPRMLRHFINMGTDVTSMSPELFKDVRLIVPIDTCTKWEKGVFLVDPDPKLSYSLAVNTRRE

SEQ ID NO: 855 - protein, 545 aa, Atrato Partiti-like virus 6
MIVVCSLGLALRLSMITFAPITNTLSCRHIEASFDEWASELRTLGVGVTRRATSGIGFRARQAQTAESVRLTSKESESLKGFWRSPVYRDVVYDTLKMSFEPKNSSVHPDFAVAYRRALGYVAKWFSSMDQLKPVAVRKASEQLPTTTSPGLPYTKFGLRSKTEARPYALTIHRKLVRKLCMGQEVHMPPAFIASRSQITEVSKHKARPVWVIPYNQLLFEGIFTVPLFEQIKKDPFFGWSYDWLSGGARRFSLMYRDNLSTLFGTDFSKFDQTIPAFLIRDTLSVIKSHFVLDHKEELIWNSMQEYLVNTPCVFFSKLARSNGSMPSGSAWTQILECIMDLVIFSTITIQRLDPYYTPRTLEQILRRSTFLGDDSVFDLHPYYQPVLGKTRKQTFCEDISTSFGLTVNLEKTWAYCEHGKIQFLGKIWNGCSFLHPTDAGIRALVYPEYEDQSPSDLMSRCIGVAYAACDNQELYAICERNFSFYQRQGYEPSPFKVDYRRFFAHEMFMDIPTLEFPTFSRIQALINKELSAIDISRINARRSI

SEQ ID NO: 856 - protein, 543 aa, Bactrocera dorsalis partiti-like virus 1
MNKEETTSEFFKRLTPGSGFAFNYQPSRLDRNALFAINRVFDKDKVSNVRMKYHRARLNIVDLRNDLQEYAAVKNPRTHTDAYYMVLESIERDLFPDKDFKIIPWTHGSVIEFEDLPRNKSPGIPLKQQGYNTKGDALQDPDICKNIRKQWYAIESGRSVDLPDVACYARAQICSRDKNKVRATWGFPLTVFLTEAQYFYPFIEYIKNSKSRLLAYGIEMGNGGMQYLNEMTKSYTHPNIIIGDWSKFDKTVPAWLIRDAFKILEKHICWDKVLTRKSQETWPVKEFCSKARWKRLIKYFIDTPIQLSNGERWIKHGGVPSGSCFTNLIDSIVNGIVMRYLIYQQTGQLPLSDCFLGDDSVCLTEKPINLDSLSELAFIEFSMKFNPDKSYQTGNVENMHFLGYYNLFGQPYKPIDTVIASSLYPERPVQDKFETITRFIGQAYSCFEPEDAKRFFSCARILAEECNQLEDSEIENFIQTHPYQFKYLHTLGIKVEQGVKFPKFKQWDFVSITLPRACKKKFSRRHFNIEELSQYIEKWKTDE

SEQ ID NO: 857 - protein, 542 aa, Bactrocera dorsalis partiti-like virus 2
MAFIKLDITTDSSGESLYRIRNPVYSSRPTIDPSPGIPDRNLLPKGKGFSFNMDPPFCDFKVLRAMCAAGFKSEAERILYSTRRSYITPEAIWNGLTNYTNPSARRLDDAVYQQVLREARSQFFTPLTPISIEEASGLIPQSTSPGLPYLHTHPGMKKGEVLATELPRIKRYWESVGRGEYTLPPHDCAAFARSHIGPADTNKVRPVWAFPLDVVCAEAKFAHPYTNALKEQTIGRNTAYGMEMMCGGMTWLDNQLKHARLIDPGCKFLMTDYSQFDSTVPAWLIRDCFSIIWECFKGHCTREDYYVFKKLTSYFINTTIRNPDGRRLRKLHGVPSGSMFTNIIDTIVNFIVTRYIIKKICQSDVMTDVYFGDDAIVVLRSSTLINIDLLSQAADYYFGMKINTKKSYWTNNINNVHFLGYYNAHGDAFKPSAELFASLLYPQYWVDDWKYTLARTMGTLMAAGGNNTDVFIVSQMIYLLATSRNTAFDDAQNLILNNPRMRRHFSTMGVQPEEINCTMFLSQQNSIPLLKCTKIIKDIKII

SEQ ID NO: 858 - protein, 542 aa, Bactrocera dorsalis partiti-like virus 2 isolate Bf
MAFIKLDITTDSTGESLYKIRNPVYSSRPKIDPSPGIPEKHLLPKGKGFSFNMDPPFCDFKVLRAMCNAGFKSEAERIIYSTRRSYITPEAIWCGLTNYTAPTTRRLDDATYHQVLREARSQFLTPLKPISLREAAGLIPQSTSPGLPYLHTHPGMKKGEVLATELPRIKRYWDAVGSGSFTLPPHDCAAFARSHIGSADTNKVRPVWAYPLDVVCAEARFAHPYTDALKEQTIGRNTAYGMEMMCGGMTWLDNQLRHARLIDPGCKFLMTDYSQFDSTVPAWLIRDCFAIIWECFKGHCTREDYYIFKKLVSYFINTTIRNPDGRRLRKLHGVPSGSMFTNIIDTMVNFIVTRYIIKTICQSDVMTDVYFGDDAIVVLRSSTLINIDLLSQAAAYYFGMKINTKKSYWTNNINNVHFLGYYNSHGDAFKPSAELFASLLYPQYWVDDWKYTLARTMGTLMAAGGNNTDVFIVSQMIFLLAASRNTVFEDAQKLIVNNPRMRRHFSTMGVQPEEINCSMFMSQQNSIPLLKCTKIIKNIKII

SEQ ID NO: 859 - protein, 542 aa, Bactrocera dorsalis partiti-like virus 2 isolate Bl
MAFIKLDITTDSSGESLYRIRNPVYSSRPTIDISPGIPDRNLLPKGKGFSFNMDPPFCDFKVLRAMCAAGFKSEAERILYSTRRSYITPEAIWNGLTNYTNPTAMRLDDAVYQQVLREARSQFFTPLTPISIEEASGLIPQSTSPGLPYLHTHPGMKKGEVLATELPRIKRYWESVGRGEYTLPPHDCAAFARSHIGPADTNKVRPVWAFPLDVVCAEAKFAHPYTNALKEQTIGRNTAYGMEMMCGGMTWLDNQLKHARLIDPGCKFLMTDYSQFDSTVPAWLIRDCFSIIWECFKGHCTREDYYVFKKLTSYFINTTIRNPDGRRLRKLHGVPSGSMFTNIIDTIVNFIVTRYIIKKICQSDVMADVYFGDDAIVVLRSSTLINIDLLSQAADYYFGMKINTKKSYWTNNINNVHFLGYYNAHGDAFKPSAELFASLLYPQYWVDDWKYTLARTMGTLMAAGGNNTDVFIVSQMIYLLATSRNTAFDDAQNLILNNPRMRRHFSTMGVQPEEINCTMFMSQQNSIPLLKCTKIIKDIRII

SEQ ID NO: 860 - protein, 500 aa, Bania partiti-like virus
MLQYYMGGVCTMLTSVKMESVFDKETCARLQQHLNRRSGGIELFRLRRLVELVAAQQGKEIHLPEKAYRSCYRPEMLDEPLKKFLAEKRFTPDHKRLTVAVSRVRKKLKKMGHVDPISVEDSYQLLLSSKGEKSAGLPTMGKKREDTGALSRAEACLKGKCPPPVVFAHRGKNTEVARIVQMFPIEWHIIEGVYFFPLQEKFKRNVSVYAAENAVNRRAIFNEIVASGEYSSKLAMDYSGFDGTIGSQLIGIAFGLLHEHLKLDDKLEKLWSRVATYFATCPFVDQYGNVVSGRKGGVPSGSMFTQMVDTLVNAIVVEYIFVDEQRTRYYVYGDDSLIFLKGTVEEVSSKLETYKSEAEKLGIIVNLKKTHVCAPSEPTIFLGHYDLHSGRPVDDVLTRLIYPERAFKVDATHLATRVAAYMAESDEVMGILLPVYRIIKDIGDSEARADIPSYAHRGTEGLTTIELGRVYPYMLTGLAQFLANEDPALTNSFWRMRSSV

SEQ ID NO: 861 - protein, 476 aa, Baringo Partiti-like virus
MVTVLPRKDGFAQRHSESTWMSSYLQVFGFPFDLDLARSPVTLKSIRDDIFKFRSISKVQPKCPYLELAIAKAFRQFKIPLVEMIHLNDVFKQDLNIWTSSPGLPWKDIGYKTKGDIRKDPDAINKIRWFWHRIKHDQYLHAPDSCAFMRSHLAKKGETKVRAVWGYPATITFGEAVFAVPLIKAYQKYGTSPIAYGYETAIGGTKKLFDQAVNYPNHVALDFKSFDKTVPSWLIRIAFDVLRYNIDFSKYQEYGVADVHRMWKMWDYIIDYFINTPIRLCNGERYRKHSGVASGSYFTQLIDSVVNYILIEWMALRQSLKILYCRVLGDDSIMSLNKPFDIDSAAELAESIGMIINVAKSASSRHIHNLSFLGFRINNGRPTKDTFDWLAALAFPEYKDRSWDDLASRALGLLYACSGTDKFFDRLCRDIISFKPFELNFGRSVSRFLSMLGFKPQSLTTDLPSPMQFARRLGVY

SEQ ID NO: 862 - protein, 539 aa, Beauveria bassiana partitivirus 1
MEFTQDPTQHDVFTEGSHLVDALHLRPGNQRSTISEEVIPPSFNAFGLREIAKYGGYSTYSSASNTDPYVRETLKTYSRSTYERVRGYTRRPQGTPGMYKSLLKFSDDEPNQFHRLTRVQRRAMFSAIKKARQAFKLPWKREPLDWHQVGQYLRRDTSAGSTFMGSKKGDVMEEIYHEARWLGHRMKQDGRGQFNPSRMRFPPCLAGQRGGMSEREDPKTRLVWIYPAEMLVVEGFYAPRMYHDYMKDSHSPMLNGKSSQRLYTEWTCGLREGETLYGIDFSSFDTKVPAWLIRVAFDILRQNINWDTFQGEQVSKRERQKWRNVWDSMVWYFINTPILMPDGRMFRKYRGVPSGSWFTQMIDSVVNYILVDYLAGCQEVEIRNLKVLGDDSAFRADDSFSLAVAERDSSAVGMVMHPDKCEKTLNPSEFKLLGTVYIDGHPHRESDEWWKLALYPESTVPSVEVSLTRLVGLWIGGAMWDRDFCNYMDYFQTCYPCPEEGWFSKDQRRWLEIVFSGKAPRGWTNKRSLFWRSIFYTFG

SEQ ID NO: 863 - protein, 539 aa, Beauveria bassiana partitivirus 2
MEDYTQDPSTHYVLAKGSHLIDSLHLRPAKTGSTTSEDVIPSNFSNPFLTEIAKYGGYATYSSNSNTDPWVRETLKHFSREIYEDIRGYTRRPQGTPGMYSALLKFAGERNSFHSLSPWQQKCMRNSIAKAKKAFKLPYSREPLDWHDIGQFLRRDTSAGSTFMGSKKGDVMEEIYHEARWLGHRMKQDEKKPFNPTRMRFPPCLAGQRGGMSELDEPKTRLVWIYPAEMLVVEGQYAPLMYRDYMNDPNSPMLNGKSSQRLYTEWCCGLREGETLYGLDFSSFDTKVPAWIIYAAFDIVKQNVNFETFDGKPVSPADRQKWKNVWDGMVWYFVNTPILMPDGRMFRKLRGVPSGSWWTQIIDSVVNYIINQYLADCQRVEIRNLKVLGDDSAFRAGDQFDLELAQTDCDVMGMVLKPEKCDKSKDPSDFKLLGVKYRNGHVHRPTEEWFKLVLYPESSVFTLDISFTRLIGLWLGGAMWDRIFCEFMDYYQSCYPCPEEGWFSKEQKRWLEVIYSGKAPRGWTTKRSLFWRSIFYAYG

SEQ ID NO: 864 - protein, 584 aa, Beauveria bassiana partitivirus 3
MLGNKTFKNIGALRQLKRVSKFSSKPSTYNDPYAYDAVASVSGPRGRALLESVSQDWHRPSGDVQLLEEGIMKYSEPSRKRCVDGDYLAILKKTLDELRPAERIVPLTLGAAAKHPDFPRTTSPGFPWVTQGYATKGDVLADKVASGRCHRAWDTIGRGANWSLPDSMAFHRVVASEREKVKVRPVWGYPTEVVLEEARYFLPLIAHLKSHSDSTDGFYGLGMETAKSGHRHLARNFEIEGVQYSMSGDFSNFDARVPSWLIRDIFSYISDWFDFSKVRDSDGKYWNVNVSQTCRRWKAMVSYFVSTKVRTPSGLRVQKSHGVPSGSMWTNVIDTIAGAVQMRTALYRTQGYLPHKDYYYGDDSQVFLDECPDLEALASVLDDVFGAILSPTKTILTTNPDNIHWLGYYHRDTGPERDLRFILASTIFPEREVHSPLESAARLLGQLYSCMHPVHAVVFYDAVQHILDKYNLTRGLLDEYVSQLPAKAMKFLVTVGLDIDEITTPPVECSAFGGRFISSVLPKPSARTFVRTRHRVLPEYAFAAEAYSNRALRTPNFFHDFSLFKQTFDVPYDEFLDDSGYFTD

SEQ ID NO: 865 - protein, 512 aa, Benes partiti-like virus
MEAIKDLSSFVIQPFRRKFLKAYCDRMSKDNLNCLWDDNVASVLEEQGFSILEAPRSVYRVEKLYQALAKYAPKSSPKIDMDDRDVKVGVSLAYACFAKPKEDPCLELSDLTPDFIYKITSNHKGSAGLTAWGQTKAESYVHAYECALRQISGEKRPDPCVAFKRTQFNDKTRLVWGYPYAMTALEGLFARPLIERLKQGDTPMAFGMSTGVLGSKLRVAGRHKEWAYSTDVSSFDSSIGQQLIKCAFNILSTWFNLNEIETTSGQSYKIIWKMIVNYFIHTPIVMPDGNIYKGKQHGVPSGSYFTQIIDSVVNVILVGAISSRFSLHVDKSDIFVLGDDILFWSNRNVNLEHVAKYASSVFAMTFNAEKSSKYRYNEQIHYLGRDWMNGVPTLADSEILKRMVQPETFRKYDDDKVKRERQVRMLILSYVAVYRNAYHIYLKCMDWPRRYCCTNADIENWVYTTGVTRRRDRSYRPNADYMSGLARYLHKYVLNEHGSLGTFTPIALQFWK

SEQ ID NO: 866 - protein, 596 aa, Bipolaris maydis partitivirus 1
MLNNLVLGIKRGLAKAIRGNAQDNHVIEAYHHVVLHALNRFLPQHEVYEIVHGYRRSVFDENALNRDIQKLNSEDHPVPKDEHYWNAIRKVQQIFTPDVLLQPVHFADLRHYPWKLSTSIGAPFATSKEWNAYVVDKFHGYENGFDESTFLKHYHRDLFAEAHSGISLDPPMIDARMSKRNLYNEMFFINRKHIHIIKDGRKTNDSGHDLRYWHTAFARQHLVKQDDPDKVRLVFGAPSTSLMAELMFIWPIQAWLLSLKERSPMLWPFVTLTGGWHRLVNCFQKFCPNFGLVASVDWSGFDRYARHSVIRDIHSNIMRPMFDFSKGYHPTRDYPETQDTDPDRLENLWNWMCDSVLTTPLMLPDGTLIRFQHSGIFSGYFQTQLLDSIYNLVMLFTIFSKMGFDLDNIYAKVQGDDSIICIVCSFLMVSHWFITMLKHYANYYFGAIVNDKKTEVSDTLEHVEVLRYRNRGGIPYRERIELLAQLYHPERAITYQALMARSVGIAYANCGSDPRVYQICENIHQYLSKLGVKPDPAGLPSGVRFVQDYLPGQTAIDVQRFPSYFETVSRLLDGYEEQPSESYWPRSHFIGIPGRT

SEQ ID NO: 867 - protein, 675 aa, Bipolaris maydis partitivirus 2
MSTLLPTQDDLLEEVLDDLHPTSVLHTHFDPEDELENEVLRPNEKFEFYGQRTDPLPDNRVPKSGIQCLAHLKYHNTSRDHQYADQPASGPPPMRGVSRIIRDSFPQYTDYLREWCRPKSYDEAILNDFNYEQRPTQPLSAARKRQLLPLIDHFMAIKPYDIVHYCDTRFYPADLSRKADYFHNFSRARKNHAAKSHPDYANGPTKKSWFINAHLFHDRATVHNIKLFALPFRPYPDEKRNNTLLQLWFQKIPTELLVRSHISHPDKLKVRPVYNAPMIYLRIEMMLFYPLLAQARKKECCIMYGLETIRGGMSLIEQLASAMKSFLMIDWSRFDHLAPFPLIDFLFEDWLPTKINVDSGYAKIRNYQDHVHSFKAQAQKLNAWLESNIDETHPDIGVFAHKVSNLISFLQRWYKEMIFITPDGFAYRRQFAGVPSGILMTQFFDSFVNLTILLDGLIEFGFKDDEIKDFVLLIMGDDNVALTNVSALKILEFLEWFTDYSLIRFGMKINIDKSSSTSIRRKIEVLGYQNHYGMPSRSISKLVGQLAYPERHVTDVDMCMRAIGFAYTACGKDTTFHSFCRKVFHYYYAKVNIPIDQLFETGKFGLPGTFFAYKDIASHIKLDHFPSIDEVRELVSSHQGFLTEEPLWNYNYFLHPPAPNRSDSLTLYEYRASQK

SEQ ID NO: 868 - protein, 393 aa, Black raspberry cryptic virus
MALQLVNDHDFIDFQADLEILPENHAQTIRREPNTVYHDDFALRELKSAYPLLYEQYLEGWSRSFYTKEDHMKAIMQYSYPNIPIEAVNENLYNQAINATLERLRSLPTVRAIDVLTDLDSVSFEPTSSAGYGYNGVKGDSLGEIHKQAIRRAKATLWSAIRTEDEGIDHVIRTFVPDVGYTRTQLTQHREKTKVRGVWGRCFHYILLEGTAAQPLLDAFKAGTTFLHIGQDPKQSVPNLLSSISNHCKWLMALDWSSFDATVSRFEIHAAFDILKQFVQFPNVETEQAFEISRQLFIHKKIAAPDGKIYWSHKGIPSGSYYTSIIGSVVNHLRIEYIFRTVTGNGPKVCYTQGDDSIIGLDSYIDPSLLSEAAQPLGWVLNPAKTETEAVGM

SEQ ID NO: 869 - protein, 80 aa, Blacklegged tick associated partitivirus
RGQGCRDFIVSSRRFMDRRWNEVKDVETSLSRLVGLWIGGGMWDTHFSSFMHFFQSSYPCPSEGWFTKDQRRWLEVVHGV

SEQ ID NO: 870 - protein, 572 aa, Botryosphaeria dothidea partitivirus 1
MLLTEIPNVYQRALALERRIRVRELFPEGLVPYLKRQEHAGSIASPIGPSRSVAPKVTDKFIAKAPLEDYPDKRYTLECTSTMQYIGQMDAYPFHSSIPEFDPWFRHVLKARAPDVSLHLEQTYTRDPCTPDRVMSFLKLFDRTWKRKPTGRLMSQAESIVKKMFKCVGQVNPIDFNYAGWHEILPHLDMSSSPGLPLRREYATQGECLGHIYDKSKRLNHFAKFLHPAAVRAPPCMIGLRPGLLKKDELDEKIKARGVWAYPAEVKVIEMRYVIPLLERFKSQFGKIPYPVGVNLTKALPFIIDHLLNDGKHGFVTDVSKLDTSVGPDWIDWAFSFLKDFYYMGMTESSETRNSHVFDFLHYYFKRTPILFPSGQLVRKSGGVPSGSGFTQIVDTLCTLLMTTYSMLRMGYQEDDIIGKIFAVGDDMATSVPSSFDVEQFSFYVGQLGFEINVDKVMFSNRGIELKFLGYSKYGGNIWRPIDELLQTAYFPEKYVGNPERSRQRILGQTLASGLTNGFLSKVNYWMEELCSWHTELDTDEVYIPQKRWMRNVLGLDEIPRSALLFDIFPLC

SEQ ID NO: 871 - protein, 572 aa, Botryosphaeria dothidea partitivirus 1-like
MLLTEIPNVYQRALALERRIRVRELFPEGLVPYLKRQEHAGSIASPIGPSRSVAPKVTDKFIAKAPLEDYPDKRYTLECTSTMQYIGQMDAYPFHSSIPKFDPWFRHVLKARAPDVSLHLEQTYTRDPCTPDRVMSFLKLFDRTWKRKPTGRLMSQAESIVKKMFKCVGQVNPIDFNYAGWHEILPHLDMSSSPGLPLRREYATQGECLGHIYDKSKRLNHFAKFLHPAAVRAPPCMIGLRPGLLKKDELDEKIKARGVWAYPAEVKVIEMRYVIPLLERFKSQFGKIPYPVGVNLTKALPFIIDHLLNDGKHGFVTDVSKLDTSVGPDWIDWAFSFLKDFYYMGMTESSETRNSHVFDFLHYYFKRTPILFPSGQLVRKSGGVPSGSGFTQIVDTLCTLLMTTYSMLRMGYQEDDIIGKIFAVGDDMATSVPSSFDVEQFSFYVGQLGFEINVDKVMFSNRGIELKFLGYSKYGGNIWRPIDELLQTAYFPEKYVGNPERSRQRILGQTLASGLTNGFLSKVNYWMEELCSWHTELDTDEVYIPQKRWMRNVLGLDEIPRSALLFDIFPLC

SEQ ID NO: 872 - protein, 579 aa, Botryosphaeria dothidea partitivirus 2
RKTLKFYRVTGFPPPSLHRPFMEELLYVPPSLDNVVEESLSLDDSTLTPSNRTRGASYDVIPPNFQSANLREIARYGGYGVYSGQSNTDAWVRTSLKEFDRSVYDQIYGYTRRPEGTIGMYKSLLKFSDAKNEFHSLNRDQRRAMQKSIGKAKKAFKLPWKQEPLDWHDVGQFLRRDTAAGATWMGAKKGDVMEEIYHKARWLGHRMKQDGKGQVNPSKIRFPPCLAGQRGAMSDASEPKTRLVWVYPSEMLVVEGQYAPRMYHAFMDDPNTPMLNGKSAQKLYTEWCVGLREGEMLYGLDFSSFDTKVPAWLIRVAFNILRQNIDWETWHGETVNKRDRQKWRNVWDAMVWYFINTPMLMPDGRMFRKYRGVPSGSWWTQMVDSVVNYILVNYLTECQATETRGLRVLGDDSAFRSCDPFGLDQAERDAASIGMVLHPEKCDVTDDPSKFKLLGTTYRDGHAHRDTEEWFKLALYPESSVSSTGASFSRLVGLWLGGAMWNLHFCKFMEYYQSCFQCPEEGWFTKDQRRWLQVVYQGKAPRGWTTKRSLFWRSIFYTYGECNLNLVVNVPPTDTYNKS

SEQ ID NO: 873 - protein, 539 aa, Botryosphaeria dothidea partitivirus 3
MEELLYVPPSLDNVVEESLSLDDSTLTPSNRTRGASYDVIPPNFQSANLREIARYGGYGVYSGQSNTDAWVRTSLKEFDRSVYDQIYGYTRRPEGTIGMYKSLLKFSDAKNEFHSLNRDQRRAMQKSISKAKKAFKLPWKQEPLDWHDVGQFLRRDTAAGATWMGAKKGEVMEEIYHKARWLGHRMKQDGKGQVNPSKIRFPPCLAGQRGAMSDASEPKTRLVWVYPSEMLVVEGQYAPRMYHAFMDDPNTPMLNGKSAQKLYTEWCVGLREGEMLYGLDFSSFDTKVPAWLIRVAFNILRQNIDWETWHGETVNKRDRQKWRNVWDAMVWYFINTPMLMPDGRMFRKYRGVPSGSWWTQMVDSVVNYILVNYLTECQATETRGLRVLGDDSAFRSCDPFGLDQAERDAASIGMVLHPEKCDVTDDPSKFKLLGTTYRDGHAHRDTEEWFKLALYPESSVSSTGVSFSRLVGLWLGGAMWNLHFCKFMEYYQSCFQCPEEGWFTKDQRRWLQVVYQGKAPRGWTTKRSLFWRSIFYTYG

SEQ ID NO: 874 - protein, 539 aa, Botryosphaeria dothidea partitivirus 3-1; identical to SEQ ID NO: 873

SEQ ID NO: 875 - protein, 521 aa, Botryosphaeria dothidea partitivirus 4
MTSSNHDDDNFGKDNSALWDMPFRYITEASRLPGYKRGILRQTQNYDPFVDTALKQFDPELREGIKGYTRSPGDAWDLSERFRRYDVATLIHPTGDSYFTACYRQAVEETTRDFKLSAPVVPHWILDVDLVKSTSSGYPHFKRKGDIFDQIRQEGRFHLHHLKLYDLHRCPLLPCTMATRGSLSEVTDPKTRLVWMYPAAMTACEAVFAQPLIDKMYSEKAHLFLTGVDTKFRIQRYLSLISEETGYQGIGLDFKSFDTLRNNRLIRDAFAILKQNVKFGYYYDKISGLQKGRTGVDVRAEKAFDNIMEYFIHTPMLLPNGRIVTKHHGIPSGSHFTNLIDSIINRILIKTFALYEGIPIRQLTTNGDDSAFLASETYTPGLLEKSAVFFDKFFGMTVSVAKSCVATAPSAMHVSGTTWSSLRPTRPTTEWFMLAAYSDTFISKPLDSFQRLLGLGIAGGFGNAKFTQFFMYFQSGYDCRHGPNLLNWNKLRWLEHAFGITDLPLVYKQGSRTVTRLRLLA

SEQ ID NO: 876 - protein, 540 aa, Botryotinia fuckeliana partitivirus 1
MEEFTQEPTQHYVLAKGSHLIDALHLRPDTGKGSTTSEDVLSSDYRSPNLAEIARYGGYSTYSSNSNTDPYVRETLKLFSRDTYEDIRGFTRRPEGTPGMYKALEKFSGEKNSFNDLSATQKSSMRRAIGKAKKAFKLPYKREPLDWHEVGQFLRRDTSAGSTFMGQKKGDVMEEIYHEARWLGHRMKQDGKGRFNPTKMRFPPCLAGQRGGMSERDDPKTRLVWIYPAEMLTVEGFYAPLMYRDFMNDPNSPMLNGKSAQRLYTEWCCKLREGETLYGIDFSSFDTKVPAWLIRIAFDILRQNIEFSTFQGKPVSKKDAQKWRNVWDGMVWYFINTPILMPDGRMFRKFRGVPSGSWWTQMIDSVVNHILIDYLADCQDVEIRNLKVLGDDSAFRSSDEFQLETAKLDCKPTGMVIKPEKCEKTADPADFKLLGTKYRSGHVHRDTDEWFKLALYPESSVFTLDVAFTRLIGLWLGGAMWDKRFCEYMDFFQSSYPCPEEGWFSKDQKRWLEVIYSGKAPRGWTTKKSLFWRSIFYAYG

SEQ ID NO: 877 - protein, 579 aa, Botrytis cinerea partitivirus 2
MCLQQPTNLIYLGKQPINRRTKRFLMKQSRTSDREIRFVEKLTKKAIHVHCSPALAEETINGYRRSATDTEAGENDFLKTDLPYHDVPRDFHYKRALKIVEKMFRPHRRLKPIAFPDLRYYPWTLPTSAEAPYTESTYWQNRVAQKQSEGDTDDARLSFHNLYNEIFHINRQLVHDIKYGRKPFWTTNGEPVPYEFTYLHSRSHMVKHDKPDKIRAVFGVPKLLLMVENMFIWNLQREYLNSPLGSSPLLWGFETIRGGWMKLLNKLTGKSFNTVLSADWSSFDHKALHEVIDDVHDIWRSWFDFDQGYEPSISYTHNYSDTMSREEQIDRLWTWMCNAIKHTPIKAESGNMYQWQWNGIASGFQQTQLLDSFVNAIYLLTCLSSTGINIESEHFIALFQGDDSITTFPEMIPDTKAFIATLTSEAKRRFNADLSTDKTTIGTSPDDVEVLSYGNTSGIATRSPAELLAHLLYPERPRRAPEAAAAAAGIAQAAMGCSSQVYNTCQDVYNFLVNQIGVKPEWKEWSPNKITPYSMNVQKFPTFTETFLQNFDKRERDAHDRNLLWPSKPTGNGFHFLND

SEQ ID NO: 878 - protein, 539 aa, Botrytis cinerea partitivirus 3
MNKNVIYDDPVDAVEPFLGDNKETFLLWDASSSSRSRVTANTDFIEQPGLKEIARYGGYSTYSAPGNTDPWVRLALKIHDRERYDRIYGFTRRPAGLEGMYKALFRFGEQVNEFKSLSFDQRNCMRSAIKSARSAFRLPVKHEPLEWEEVGQYMRHDTSAGVTFPGKKKGEVAAQIYTEARWLGHRMKQGGKERFDPRKVRFPPCLAAQRGHLSPRDDPKTRLTWIYPAEMLVIEGLWAPVMYHQFMSLPNGPMLCGKSSQRLYTEWIVNYREGEKLHGLDFSAFDSSVPQWLIRTAFDILHQNVDWLNWRGKPTTKRSRQKWRNVWDGMVWYFINTPILMPDGRMFRKRRGVPSGTWFTSLVDSVVNYIIVEYLTKCQQVEAKNLKVLGDDSAFRSGRALDLEQSQKDADVLGMNLNVKKCDVTEDPTEFKLLGTTYRNQRAHREDDDWFKLLLYPENPPPDIGTSLSRLVGLWIGGAMWSHEFCRFMTFYQSCYECPTDGTFTKDQRRWLEIIHGGSAPRGWTSKKSLFWRSIFYTI

SEQ ID NO: 879 - protein, 711 aa, Bremia lactucae associated partitivirus 1
MSTSNPIRDYLSERNLRIKTEWKLFQQSQTSDETLSQLTSDSDLKRLYHGSRHYLTEQEKSHALQSQFDQILHDLKIKNTDKHEPFEYFTLRSRPVPPTRDPSPGITLLPLQYHIGQIVTTTETVTEQGFPLDPLLTTLLTAKYPQYLAFTQKYCRPLGTTESTFVDFNKPQIYVPPSTPERKERILKHIFRYLNAKPYLPVHFVDTLYAGLPISTGTGYHNRHSYKIKAHARYSHPKEYATKPTSKGYFLNAFLEQARTIVHRIKSSGLPFQWNLPNDPTDQDLQALYSRLNSFINEYPTLLFTRNHISDRDGKLKQRPVYAADELFLTIETMLTFPLLVQARNYHCCIMYGLETIRGSNVYLDALAQLFKSFFTIDWSAYDQSLPRTVTSSYYEDFLPRLIVINQAYQPTYEYPTYPDLTEHDMYSRMRNLLSFLHCWYNNMTFLSQDGFAYRRQFAGVPSGILNTQYIDSYGNLYLIIDAFIEFKLTDHEIEDVLLFIMGDDNSGFTHWSITKLEQFLTFLTEHAKTRWNMTISPTKSVTTTQRQYIETLSYKCNFGKPLRPLPKLVAQLCYPEHGMIYKFMSYRAIGIAYAACAMDVTFHNFCKDVYYSYLPYQVELTPDVIGNIVKFLPGQFKMLDSYVETLDLSKFPTLENVANTISKWQGPLSFSPKWNFAHFIHAPDTTLPHPKTMKQYEDENDLIIPPPPEL

SEQ ID NO: 880 - protein, 394 aa, Broome partiti-like virus 1
NNTKIPYAQALFGTHVALNARRSELRFSLIKRDMLKMGSNPHVIHDDKFGYVVRAAWDKFKLTPQHPIHLNDIFFKDMDIRKSSPGLPWQPEYKTRGEVMDCPHARNKIRWFWHRIKAGERVVPDDCKVLYRAHIQRDEPKIRAVYGYPTTITLMEACFAIPLIDQFKKGGTPLAYNYDMATGGAYRLRRHIGGYRYFGCIDFSGFDKTVSAQLIKIAFAILEQSIDIRRYHYRGVPDANRLYRAWDYLIEYFLETPLRLCNGERWKKKAGVPSGSYFTQLVGSIINWILINYAFLKRYGRMPRDCKVFGDDSVVSDDQPFSLDGLASVLEDVGMKVNREKSIYTRDVDSVEFLGFRIEGGFPCRNLDKWMEALFHPEWPDQDWDGSGEHTRGL

SEQ ID NO: 881 - protein, 435 aa, Caledonia partiti-like virus
WHHAMRPSRFIKPYYFRCKRQGWTRRITSDRSLRLWWDGYQKCRRFARSAQWDEERLDLAISSVQKEMQQRFGRLQAIPLDQVRDTFQDLSRSAGHCFFDKYSCKRDIPQCELDECERVLQYKGPKDLPPYMISFRNQIRKGEPKQRIILVSPGPLAMVEKRFAWPLQKAMEHGAYPRPWATGWCWFASGGSQVTPFIEDPTTVSLDFEKFDYSPPTFLIRKIFKMMMSLFELTPSELAIFKGISRSHVDSLAKYGDRVYHLDQGIRTGSSFTHVIGTLVCMVMIRYLCGIDISAISYGDDAMYRGGPPLKTVCRRAESTSFRISRTKSKHGVQWLGYKWRDDRWVCEDPDRRWAQYFWPEKPGCPEARLQALFLNCLSDPMRVPLKKALVELSLGVVLQETAELIGAHRYPITIEPGADIFEVEKRMKRYHRLD

SEQ ID NO: 882 - protein, 756 aa, Caloscypha fulgens partitivirus 1
MLTISQIVTINILLRFQHRRRSGNIPKQVSHPIRNIYYEWMIRSQIPEDASLQQYNVDYSRTLLHYIDLNTNFKVSESIREIQDDFFERYTSLDEPFNLHTPHDILEIPENRIPSNGLKILPFRYHQISPGLISHHGKESLTYLDPFAPETPDSREPYSFNPEVDLTGSPPHPEIVQIIHDWFPMFEQHIQTYCRPPSYGPQAFQDFNRPTDPIPPPSPQRENDILTIIRNVFAISPYRPLHFVDALAANTPNITSASYHDKFDTKAKAYARYSSPALYANRPQSKGYHFNHMMNTFRLDAHKIKNAEITLPWKLQFFLDHPTQLFIRSQISLRDPSTPKKIRPVYSVDSRFLHLEKMLTTNLLAQMRNPQCCVLHGLETFRGAMSVIDKIAHSFTAYVSLDWSNFDQRAPQPAIKCYYTRFLPSLLIVSHGYFPSRGYENTQQPIDIFATKVFNILSFLYLWYRNMVFLSFDGYAYTRLNGGVPSGLLNTQSLDSFVNMYVLADCLLEFGFTIQETMEMIFFILGDDNIFFARMNFSRIADFMVFLEDYAKRRHGMVVSILKSVYSSLRTKISVLGYENTYGMPTRPLGKLIAQLCFPERPVPDDKSWMHAARALGLATAACGQDADFHMLCYMVYQKFKPTNKVTSAQFRKVLNYAVLESLDFKFTEYMLDVPEFPTLYEIRSKVSSYAGPFNEKDKWNRSLFKDVPPSDNLNDFVTLDTWLNTHPEHSFDSQNHMQGYDSPDFLSVDFSKLSI

SEQ ID NO: 883 - protein, 720 aa, Caloscypha fulgens partitivirus 4
MEHLRNLLAETRFRIASRWQNFGKSNPLSESELRSAYQAQKTDAIAEILDRVDESTYHQYLSDIQETSAQSSEPFEFYSLPHEGTTIPENRLPAPGIRHVPLFYHRGRIVHQVTPDRIPDRMTEDSFESTYPGDSDFGYPIDPLILILVSRKYPEYMTFVHKYCRPAGTTDATFKDFNKPQVHTHSDTPEHRDKVLHHILLFTDSKPYSPLHYVDTQYAKLPLTTGTGYHNRHSYKIRTLARFTRPDEYAHRPQSKGYFYNAQHLLNRNTVHNLKNAHFPYHIDRTYTDHEYSRRWNVFINEHPTILFTRNHISQRDGILKVRPVYAVDDLFLTIEVMLTFPLLVQMRKPSSCLMYGLETIRGSNVFLDQIAQIGRYLSFFTIDWSGFDQALPFYIVLVYYTVFLPQLIVISAGYQQTYDYDSTHLDNDEHAFFTKMFNLLTSLITWYVNMTFLSADGHAYRRTFAGVPSGLFNTQMLDSFGNLYLLIDGMLAFKLTDSDIQSILLFVLGDDNSGFTHWTIAFLESFITFFESYSKERWNMTLSKTKSVITPFRNKIETLAYQCNFGRPRRPIGKLVAQLCYPEHGAKPSTMSARAIGMAYASCAQDKTFHDFCRDVYYTFLPYAELDPASLSKNRAFLPNFFKLFEESDIYIDFSHFPTLIEISDRISRYAGPLGFEPKWNKSHFVNDPDVVPPNSKTMFEYMNEHNVQFPDFTPFETV

SEQ ID NO: 884 - protein, 716 aa, Caloscypha fulgens partitivirus 5
MLSHFRDFLAEKLARSRLEWKTFQSNVKDAQATLSASQDPDYQRLYDSFTHTFDTSIETEAFNNMISSQIQYLKEENTRRRQPYEFYSYEPDYELPDHRLPAPGIINLPLKYHRGQVIYATAHASQLYDRPVTEETYESSYPGDSDLGQPLNPMLNFLFDHKWLHYKRYAQQYCRPAGTTDATFLDFNKEQIPSAPIDPFRKDKIMAHILTKLAVTPYLPIHFVDTQFDNRPSSTGTGYHNRHSFLRRAHAKYSHPKGTENRPQSKKYFWNATYHYARTLFHQIKTTGYPFTFHLSENPTDDEKLHFINEFNHWINTYPTILFTRNHISDRDATLKVRPVYAVDELFLFMESMLTFPFMVQCRKAECCIMYGLETIRGSNHFLDSVSKAYSSFFTIDWSAFDQRLPRVITDLYYSDFLPRLITINHGYQPTYDYPDYPELTEDKMYERTNNLLHFLHTWYNNMTFILADGHAYRRTSAGVPSGLFNTQVLDSFGNLFLIIDALLEFGCSDQEIDELLLFVMGDDNSGFTFWTIVRLDSFITFLEKYALLRYNMTLSKTKSVITTMRSKIETLGYRCNFGSPRRDIGKLVAQLCYPEHGLRPQFMCSRAIGIAYASAGQDPEFHAFCKDVYTLFLPFRTDLIDPEFNVLNYIPYIFSQLDDFTQRLQKDFPSIEHVLKVYSYYHGPLTYAPKWNYAHFINSPDVTPPMVATGSRLLR

SEQ ID NO: 885 - protein, 477 aa, Camellia cryptic virus 1
MDHQFRGERQGLIELGTIPERRSREEFKVLVDPYAAEAIRVYVPYTFRQELEGWARSYYSLQQHVDAILAYQRQKLPEPTDDAWNQTKQHVLTEFRRMNQIDPISYKRFDDVKWIQSSAAGYGYIGRKGDNDNYSKAKRTAVTIAEALDHDRNYGPKALLDSTPDVAFTRTQLSQIKVKSKVRNVWGEAFHYVLLEGLFADPLIRFFKGVESFYFIGEDPLLAVPALIEEIIRAKDYVYMFDWSGFDASVQEWEIRFAFQCLESLLRFPSNVEAQIWRFLIELFIYRKIAGPNKVLYLKTQGIPSGSCFTNIIGSITNYVRIQYMFKRLTDRFALVFTHGDDSLAGVETTQFIQMDTFDSICVPLLWKINIEKSEVSRKNENISFLSRTVKEYQNARNELACLRMLMYPEYEVVSGDISALRAKSICRDAGINSRYLFEIFIYLKEKYGLAESLPFHLKVWDPTEFEARRISASEIM

SEQ ID NO: 886 - protein, 477 aa, Camellia cryptic virus 2
MAYRNLNGYDFESFETEFEDLNHFHPHVVRRESETIYRDEFALQVIREEYPIFCEQELEGWARSYYTLDGHMKAIFAYSTEDTPFTVLRASKFAEAYQAVQNELRSLPIARAFDVQTELDQIHYEQSSAAGYDYIGPKGPILGDNHKRAIHRAKATLWSAIKDRDQGIEYVIRNSVPDVGYTRTQLTDLTEKTKVRGVWGRAFHYILLEGTAARPLLENFINARTFFHIGEDPQLSVPRVLSEVSKKSKWLYAVDWSSFDSSVSRFEINAAFDLIKERINFPNFETEMAFEISRQLFIHKKIAAPDGHTYWSHKGIPSGSYYTSIIGSVINRLRVEYLWRLKFNRGPNICYTQGDDSLIGDSELLQPDELSELARPYDWTINASKTEYSTSPEFITFLGRTTRGGFNSRELVRCIRLLVYPEYPVINGRISAYRAQSIAEDSGAMSEVINLTALRLRRLYGIAREDEVPRYFVRYYP

SEQ ID NO: 887 - protein, 181 aa, Cane toad associated partiti-like virus
FLTRLPENWVPKPETHHEYFCGKYAKSFDFSKFDSSVPSWVIRAAFTVLRCCLDLTQYEHYGIPTGIHTLLKWVEHVYTNKKVVTPQITKPLYLKHGVPSGGMLTNIIDTIISYIVMYELHDCDCPSRLIIQGPFPSLTVAYGDDCHTRCCTCVDDDLVMRAKKLFGMDLKIDHPNELCCL

SEQ ID NO: 888 - protein, 386 aa, Canna indica partitivirus
MGHNQHLITDPLFNYIVLEAFEKFRLPKRVAPIHLNDIFEMPLEIRKSSAGFPWSPLFKTRGEVMDDPSARNSIRWFWHRVKDGEKLNPPDCKVLYRAHLEDSGSPKIRAVYGYPTTITLGEACFAIPLIEGFKQHKTPLAYGYDMLLGGARKLRSEIKGYKNHLCMDYKGFDKTVSSQLIELAFSILLQNLDFTQYREQGTPDLERLVNMFTYIKHYFIQTPMRLYNGERYKKTAGIPSGSYFTQLVGSIVNWIITTYSFTKVVGRMPDYLRVFGDDSVLSSNSTIPKYLIAEVIENLGMMCNLNKTLLTTNVDDVEFLGFKITNGFPQRKFRKWLELLYNPERPDDSWDMFASRALGLFYANHGIDSRFSFMCRNVVNHRPFTI

SEQ ID NO: 889 - protein, 616 aa, Cannabis sativa partitivirus
MDYLVSAYNRITQWFNHPTNLEHVGNFTLPSGLLRVNDVAISNHKATLDHAFSKYLYSHEIELITKDYRRSDIDYDSILTDFFAGDVEPFEIPFDEHVENGLQCMADAFRPPRRCRPAHILDVQQGYPYKWNVNAEPPFSTDEYFLSKRKTFGEFIRLHEYEHIDKADFFRRHPNPESHDLLRTIVPPKFGYLKSMIFSWTRRWHHIIKSGFTESTGLQTTGYFYNRFIFPMLLHTKTAIVKKNDPNKMRTIWGASKPWIIAETMFYWEYIAWIKLNPGATPMLWGFETFTGGWFRLNHLLFCGFIKESFLTLDWLRFDKRAYFTLLRRIMYIAKSFLTFEEGYVPTHAVPYHPQWNQEKILNLERLWLWTLENLFEAPIILPDGRMFKRHFAGIPSGLFTTQLLDSWYNHTMLATILSALGFNPYQCIIKVQGDDSIIRLTVLIPPSEHIKFMEHLVKLANYYFNATINVKKSEIRNTLNGCEVLSYRNHNGYPHRDEITMLAQFYHTKARDPTPEITMAQAIGFAYASCGNHSRVLWVLEDIYNYYHDLGFTPNRAGLTLTFGDSPDLMVPEIPLDHFPTKQEIRNYLTFSNYCNEAQRARTWPRTLFISDPAE

SEQ ID NO: 890 - protein, 475 aa, Carnation cryptic virus 3; identical to SEQ ID NO: 605

SEQ ID NO: 891 - protein, 762 aa, Ceratobasidium partitivirus
MFTLYTLILLRILIKFQFRRRRNQTLPPTTYPIRNILFEWEHRRSIQVDPQHVTNDTSLHFNYASSLLCYIDMMTCYNISITINDMRLAYLERYHALDEPFNLRETYYDDPPQSRIPAQNIEILPFRYHSIPPGMLNIDDVNQNITNDSAFTETPDERSHYVYSDDATQPDLTGFPPHPEIAKIIHDWFPVYEQYLSEYCRPPSFGPQAFADFNRATETKPRLDRTRHDLVMMILRLKLNIKPYRPLHFVDALAAETPLNTSASYYSKSDIDSRIFARYSSPMRYNSKGTSKGFHFNVTMNTFRHTIHNIKYFGTPHEPLDPYDDELNHALTMSYFHDHPTQLFIRTQISKRDPSLSKKIRPVYSVDERFLHIGKMLLTNCLAQCRNAQCAIAHGLETFRGSMSFLNRVFMYFSFFISLDWSQFDQRLPLYVILAFYLDFVPSLLIVSHGYFPSFGYVDTSSTDSFAEKIFNILFFYIQWYLNMVFLSYDGFSFVRLFGGVPSGLLETQLLDSFGNLYIILDCLLEFGFTPAECLMMLFFVMGDDNLIMTMIGPSRMYLFLAFLDNYVANRHGMIVSILKTVASNLRSRLTFLSYENSEGIPTRPIGKLVAQLAFPERPVPKHKEWLHAARALGLAYASCGQDATFHLLCKFVYDKFRPSSPVPANDVRKIFSKWLHQLDLFHIDETQAYYTFEEFPTYHAIRASCAEYQGPFSENDKWNFNLFPNPPSDNISEYVTLKEWINSRPALLRKISQTFDWYDTL

SEQ ID NO: 892 - protein, 278 aa, Ceratobasidium partitivirus-like
PPTPLALTTFIFERNYSHKPRPTMPFNSVRNYFAERIQRIRKEWQSYQTLDEDPSAVLSRAQDSDYKRDLDSFRHTFPEHARTQALESEYQQLRATYELKNDLNFEPFELFKRFEHFELPADRQPAPGIIPLPTRFHVGQIIRPNLETSRPIQPDEITDEAESYLPGDIDFGHPPHHIIQSLVTNKYPAYQVYVDKYCRPAGTTDATFRDFNKEQKPSEPIPEARKEQVLALVKHFLDATPFLPLHFVDTQYCKLPLTTGTGYHNRHSYKQKSHSSLT

SEQ ID NO: 893 - protein, 237 aa, Cerrado partiti-like virus
DHLATSTCDSMVADLHEYNKEPAKCVRDDVYYAVLKSIREDFKSFPTIIPLTMGAVPQRADFPGQKSPGLPYKLQGFRTKQEVIDAGLLHEINRDWQNIGFKKRRVDLPDVCLFARAQIAREGREKIRATWGYPLSVYIEEGRFFYPIQDAIKSRCHDFPIAYGYEMANGGMRVIDELLGRNPGSKFLCLDWKQFDKTVPPWIIRDAFSILAEKIDWGHVEDVEVARWSIGWRSLDG

SEQ ID NO: 894 - protein, 540 aa, Chiles partiti-like virus
MSETTKSQNPYYFLDKVSALRGAYSNLFVTNELARRRFVQHAKDTWTDNGRFHGRDGTMEKALFPYLKEGFRDWTSKTLDDLESYHYGFRKDVKMIAAAVESYAAPHAPNAIFRKEYRKMLESVASTLQPKVTFTRLNFRDVREFKEFLSNKRSSAGVFACYSIIRKKGEVDQKIFDMLQSMERNAVQNGSYDEPTQIGIRLQVSVPIDEGGNLTLRYEDDGSVSLDFKQKTRLVNMVSFCRIYTELKYSYDVQAYFGVQGWYAGGKSMAKIGDTLNDWRSKYLYWVSLDYSKYDQSLPGWFIRDAFAIIRRWFRFRDSEEEEAFDIVVNDFIHKGLVSDEKGNITHVHDGVESGSMFTQIIDTLCNYMMVYYFCILKGLKIGTDINFHICGDDIIIFHNGGFVAVDYMNTIRKVFGVRGSVDKSIVENRVCSHDDPEYLSRTWKWAGPYRDPHELIIKLIYHERWRNYGDGENEVLPIEVLKAYVDCYRLGMIEAFDVQRIEEDYARFAKGGMKEEAARAVGGIVAYELIYANKWRRAA

SEQ ID NO: 895 - protein, 477 aa, Citrullus lanatus cryptic virus
MARGTDDGFGFDDFQADLELITGSHPHQVRREPGVTYRDEYSLEELMNISPLLYEQCLSGWSRSYYLHDKHMQAIIQYGYKDVPISSINDRLYKECVHEVQNRLSSLPRVRALDVLSELDSVTFKSSSAAGYDYIGAKGPKGGENHIRAMSRAKAIMWSIAETGETGMKHAIETAVPDVGYTRTQLADITEKTKVRHVWGRAFHYILLEGLTADPLIRAVQRADTFIHIGKDPTVSVPRLLSDTAEQCKWLYALDWKQFDATVSRFEIEAAFDIVLNLLDFPNRETKLMFELSKQLFIHKKIAAPDGKIYWAHKGIPSGSYFTSIIGSIINRVRIEYLWRTITGHGPIVCYTQGDDSLCGDNILIPPERFAMVANPIGWYFNQEKTEYSTIPELITFLGRSYAGGLNKRDLKRCLRLLIFPEYPVESGRISAYRAQSISDDVGGLGDVLNKLADRLRRKYGIASEEEVPDYFKRYIP

SEQ ID NO: 896 - protein, 477 aa, Citrullus lanatus partitivirus
MARGTDDGFGFDDFQADLELITGSHPHQVRREPGVTYRDEFALAELMNISPLLYEQCLSGWSRSYYLHDKHMQAIIQYGYKDVPISSINDRLYKECVHEVQNRLSSLPRVRALDVLSELDSVTFKSSSAAGYDYIGAKGPKGGENHIRAMSRAKAIMWSIAETGETGMKHAIETAVPDVGYTRTQLADITEKTKVRHVWGRAFHYILLEGLTADPLIRAVQRADTFIHIGKDPTVSVPRLLSDTAEQCKWLYALDWRQFDATVSRFEIEAAFDIVLNLLDFPNRETKLMFELSKQLFIHKKIAAPDGKIYWAHKGIPSGSYFTSIIGSIINRVRIEYLWRTITGYGPIVCYTQGDDSLCGDNILIPPERFAMVANPIGWYFNQEKTEYSTIPELITFLGRSYAGGLNKRDLKRCLRLLIFPEYPVESGRISAYRAQSISDDVGGLGDVLNKLADRLRRKYGIASEEEVPDYFRRYIP

SEQ ID NO: 897 - protein, 539 aa, Cladosporium cladosporioides partitivirus 1
MEDFTQEPTNHYVLGKGSHLVDALHLRPAKTGSTTSEDVIPLHFEDPNLREIAKYGGYSTYSSNSNTDPQVRESLKLFNRDIYEDIRGYTRRPQGNIGMYTALNKFSGERNTFRDLSPSQQASMRRSIAKAKKAFKLPYKREPLDWHEVGQFLRRDTSAGSTFMGAKKGDCMEEIYHEARWLGHRMKQGGKRSFNPSRMRFPPCLAGQRGGMSEIDEPKTRLVWVYPAEMLVVEGFYAPLMYRDFMNDPLSPMLNGKSAQRLYTEWCCKLREGETLYGIDFSSFDTKVPAWLIRVAFDILRQNVEFSTFEGKPVDKVDAQKWRNVWDAMVWYFINTPILMPDGRMFRKYRGVPSGSWWTQMIDSVVNHILIDYLADCQQVEIRNLRVLGDDSAFRANDQFDLEVAKLDCVPTGMIIKPEKCERTKDPSEFKLLGTKYRDGRVHRDTSEWFKLALYPESSVYTLEVSFTRLVGLWIGGAMWDKVFCEFMDFYQTCYPVPDEGWFSKDQKRWLEVVFSGKAPRGWTTKRSLFWRSIFYAFG

SEQ ID NO: 898 - protein, 523 aa, Cladosporium cladosporioides partitivirus 2
MSFDDIDNDDTFGEENPIVWDYPLRYATETRRYPDYKRGILRQTQRYDPYVDVALKSFDPELRERIKGYTRTPGDEYDLHGKFLKYDRAPLLFPTSDDRFTASYKLALQQTMKEFKLDAPIIPHWIKDVDLVKSTSSGYPHFQRKGDILDQILQEGRFHFHHLKLYDLHRCPLLPCTMSTRGGLSEQTSPKTRLVWMYPAAMTACEAVFAQPLIDKLYSQKADLFLTGVDSKFRIQKYLSLLSDEKDTAGVGLDFKSFDTLRSNFIIRDAFAVLKQNIKFGYYYDKITGTQRGRSGVAERTEKAFDNIVEYFIHTPMLFPNGRCVTKHTGVPSGSHFTNLIDSIINRILIKTFGFYEMLNIRSLRTNGDDSAFTMLEERTTGVLHKAAVFFDKFFKMTVSVDKSCVAMAPSEMHVSGTTWRALKPTRPTDEWFMLAAYSETYIQSPFDSFQRLLGLGIAGGFQDAHFVQFFSYFQSGYDCRNGPNLLNWKKLRWLEFAFNITDLPNVYKQGSKTALRLRILAA

SEQ ID NO: 899 - protein, 539 aa, Cladosporium ramotenellum partitivirus 1
MEDFTQEPTNHYVLGKGSHLVDALHLRPAKTGSTTSEDVIPLQFEDPNLREIAKYGGYSTYSSNSNTDPQVRESLKLFSRDIYEDIRGFTRRPQGNVGMYTSLMKFAGEKNTFSSLSPSQQASMRRSIGKAKKAFKLPYKREPLDWHEVGQFLRRDTSAGSTFMGAKKGDCMEEIYHEARWLGHRMKQDGRSSFNPSKMRFPPCLAGQRGGMSEIDQPKTRLVWVFPAEVLTIEGFYAPLMYRDFMNDPNSPMLNGKSAQRLYTEWCCKLREGETLYGIDFSSFDTKVPAWLIRVAFDILRQNVNFETFEGKPVDKVDAQKWRNVWDGMVWYFINTPILMPDGRMFRKYRGVPSGSWWTQMIDSVVNHILIDYLADCQEVEIRNLKVLGDDSAFRGNNQFDLEVAKIDCLPTGMIIKPEKCERTLNPSEFKLLGTRYRDGHVYRDTSEWFKLALYPESSVYTLDISFTRLVGLWLGGAMWDKVFCEFMDFYQTSYPVPEEGWFSKDQKRWLEVIYSGKAPRGWTTKRSLFWRSIFYAYG

SEQ ID NO: 900 - protein, 578 aa, Clohesyomyces aquaticus partitivirus 1
MCLQQPTNLIRLGRFPFNRRTRRLLGHHTRVSPREQKFVSGVIKRGIYSNCNPDLAHKAINGYRRSATNPESGEQDFLKTDLPYHDVPRDFHYLRALRVVEKMFRPSRRLKPIAFPDLRYYPWTISTAAEAPFTESKYWQEYVRQKAREGDIDSDRMSFHNLYDEIFHVNRQLIHDIKYGRKPFWTSSGKPVPYEFTYLHSRSHMVKHDKPDKIRAVFGVPKLLLMAENMFIWNIQKDYLNRPAGSSPLLWGFETIRGGWMKLITKLNSKSFKTLLSADWSGFDHKALHEVIDDVHTIWRSWFDFDSGYEPSKSNTHDYTDTKSREEQIERLWTWMCHAIKHTPIKAESGNMYQWQWNGIASGFQQTQLLDSFVNAIYLLTSLSACGVNIESKDFQAYFQGDDSITAFPEHSDFKLLVKQLTLEAKRRFNADLSTDKTTIGPWFNDVEVLSYGNKSGLATRDPAELLAHLLYPERPRRPGEAAAAAAGIAQAAMGHSREVYNTCLDVYTFLVKTLGIEPQWKEHDPNKITPYSMHVQEFPSFEDTFLQNFDIRRRTDSDNNRLWPTKPTGNGFYFLNN

SEQ ID NO: 901 - protein, 524 aa, Colletotrichum associated partitivirus 1
MDPVHDLPSDDFSDRDSPIIWELPFRHITDVKWLPAHRRGVLRQTQRYDPYVDVALKTFDPELRERIKGFTRSPGGEYELFGKLRKYDTTPLPLKFANKRFRLAYSQALSETMKELKLDAPVVPHWILDVDLVRSTSSGFPHYQRKGDIMDTIRQEGRFQMHHMKLFDMWRCPLLPCSIGTRGGLAEAHDPKTRLVWMYPAAMTATEAVFAQPLIDKLYSEKADYFLTGVDSKFRIQKFLSLLSDEKDKCGVGLDFKSFDTFRCNQLIRDAFSVLKQNVKFGYYYDRITGVQQGRSGVAERAEKCFDNIVEYFIHTPMILPNGRVVSKHVGVPSGSHFTNLIDSIVNRILIKTFGFYEGLRLSKLSTNGDDSAFYLPSDEISGILEKAAKFFDYFFGMTISVSKSCVAAQPSDMHVSGTTWAALRPFRNTDEWFMLAAYSDTYIRAPFDSFQRLLGLGIAGGFSDRKFVSFFSYFQSGYDCKHGPNLLNWNKLRWLEHAFNVTDLPLIYKQGAKSTMRLRLLVF

SEQ ID NO: 902 - protein, 608 aa, Colletotrichum associated partitivirus 2
MKNLNFLRTLEISFFGSHVREKFAEYQPFRLDWLVNRAKRFFSEEEVEKALSNRRSEHNEEALIKDFMSFEQPYHPIPKDSHYKKAVARVTELFDPGRPLHPISFPDLRYYPWKLKPNAEAPWNIPDFTFTPTFRDLDDESETPKLEEHLSRLSNWISDRVVTVRQYLNTKYLIGMIDNQFPKFHNLYNEIFQYNRTLVHQIKEGHPAFWKNGIPRTYFWTTLHARSHVVGKDEPDKIRAVFGVTKLLLMIENMFIWPLQATYLNDPDKGRLLWGREMIRGGWKKLHAEIHENGKPNTFLSLDWSQFDKRLLFELIDDVHQIWRTYFDFSRYQPTSFYPNANPRDVRRLERLWQWMCYSIKHTPIRLPNNQLWSWNYNGFSSGFQQTQLMDSFANMIMILTSLSSLGININHKSFWIRVQGDDSLIAFYEQIYLIYGPTFLTQLGDAAMHYFNAKLSVKKSQLHNSLNGMSVLSFFNDFGLPYRTDEDLLRHLFFPERNQDLARTASAALGLAYAASGCSPRFHKLCEYIWTKLVKEKGFSPNEESIQWLERAGVFTELDVKAMLSEAFPQQLELRAQVWYHTPRSVQERERLWPTQPGTRGRFFFLP

SEQ ID NO: 903 - protein, 573 aa, Colletotrichum eremochloae partitivirus 1
MSRLRFLRRVSRFPARNETYFDPFAHAALNAVSGPDVREYISDIKETWHRPSGDDAVLEKNLMDYGDTLPRRSFDGAYLAILKKTLDELRPAEPIIPLTLGAAAKHPQMPHSTSPGFPWTTKGYRTKRDVFQDKSAMGLIHRAWDSIGRGIAWQLPDCLGFHRTVASTRDKSKIRPVWGFPTDVIVEEARFFFPLMEELKLINNERDTFYGTGMETMLSGHQHLARNLTTASVKYVLNSDLSRFDAHVPSWVIRDVFAHISSWFDFTRVRDSEGKIWNCNPSQTCRRWKAMVSYFINTKVRMPSGLRFQKNQGVPSGSMFTNLIDTCVNAVQFRTALYHCTGSLPPKDYYYGDDSCIFLREVPDLDAIAKHLLEHFGAELNVDKTILTDNPDNIHWLGYFFRSTGPRRSFDFIVASTLFPDREIESPTDSAARLLGQLYSCMDPKAAVVFYDAVTWLQSTYDISVTELNSYVASLPSKAMKYLTTLGLSIEEVTLPSVSVDPFGGRVVTDILPRPCARNFFRFRDPHLPKYAFCAEAYQNRALRQPIFRDFDKYSQTFTQHFDYELDAAYFTD

SEQ ID NO: 904 - protein, 525 aa, Colletotrichum gloeosporioides partitivirus 1
MDPVHDLPSDDTSVEDNAKLIWTLPFRYITDVKWLPNHKRGILRQTQRYDPYVDVALKTFDPDLRERIKGYTRSPGGEYELFGKLSKYDTAPLPLKLSNKRFRLAYAQALSETMSELKLDAPVVPHWILDVDLVKSTSSGYPHYQRKGDIYNQILKEGRFQMHHMKLYDMWRCPLLPCSIGTRGGLSEAHDPKTRLVWMYPAAMTATEAVFAQPLIDKMYSEKKDFFLTGVDSKFRIQRFLSLLSDEKDKCGVGLDFKSFDTFRCNQLIRDAFSVLKQNVKFGYYYDRVTGVQHGRSGVASRAEKCFDNIVEYFIHTPMVLPNGRVVSKHVGVPSGSHFTNLIDSIVNRILIKTFGFYEGLRLSKLATNGDDSAFYLPSDEIDAILERAAKFFLEFFGMVVSVSKSCVASSPSSMHVSGTTWAALRPFRTTDEWFMLAAYADTYIRAPFDSFQRLLGLGIAGGFSDSKFVRFFQYFQSGYDCKHGPNLLNWSKLRWLEHAFNITDLPLVYKQGSKSVMRLRLLVF

SEQ ID NO: 905 - protein, 571 aa, Colletotrichum liriopes partitivirus 1
MPLKILRNVARFTARSERQHDTFAREALMATASARTLAFVTKVSQEWHRPSGDHALLEDSLSKYDCNLPKRCVSGDYLAILKKTLDELRPDERIIPLTTGASAKHPNFPTTTSPGFPWVTQGFATKGEVIGSAAAMGHIHRIWDSIGRGIPWSLPDSLTYQRVIASPAERTKVRPVWGYPVEVIVEEGRFFYPLIDALNKLCNDDDAFYGLGMETMRSGHSHLSRSFDPTSTRLSLSADLSNFDARVTDWIIRDVFALLSDWFDFTKVRDSEGKIWNVKPEQTCRRWKAMVSYFINTKVRTPTGKRFQKSAGVPSGSMFTNVMDTIVNAVQMRTCIRRVTGHLPAKDYYFGDDSQMFLDTDINLDALAKELLLTFGAILSVEKTILSDNPDNIHWLGYFHRSTGPRRDLAFIVASTLYPERPVDAPIESCARMLGQLYSVMDPKAAVIFYDAVRWLQQKYSISTVDLDKYVESLSPRALRYLVTLGMAQSEVKLPDCFTDPFGGRYIPAVLPRPSPRKFRSRRDRNLPDYAFIPEAYSNPHLRQDGFHDFNIFTEINPSCDLEFERSYFSD

SEQ ID NO: 906 - protein, 539 aa, Colletotrichum truncatum partitivirus 1
MEDFTQDPTQHYVLAKGSHLIDALHLRPAKPGSTTSEDVLSSDFESPNLREIAKYGGYSTYSSNSNTDPWIRETLKIHDRETYEQIWGYTRRPQGTPGMYTALGKFAGEKNVFGDLSSSQQSSMRRAIGKAKKAFKLPYKREPLDWHEVGQFLRRDTSAGSTFMGQKKGDVMEEIYHEARWLGHRMKQDGKRSFDPTRMRFPPCLAGQRGGMSERDDPKTRLVWIYPAEMLVVEGFYAPLMYRDFMNDRNSPMLNGKSAQRLYTEWCCNLREGETLYGIDFSAFDTKVPAWLIRAAFSILRQNVNFETFQGKPVEKEEAQKWRNVWDAMVWYFINTPILMPDGRMFRKFRGVPSGSWWTQMIDSVVNYILIEYLADCQKVEIRNLRVLGDDSAFRSGDQFSLESAKIDCIPTGMIIKPEKCERTKDPSDFKLLGTKYHDLHPFRDTEEWFKLALYPESSVHTLDISFTRLIGLWLGGAMWDRKFCEFMDFFQTSYPCPEEGWFSKDQKRWLEVIYSGKAPRGWTTKKSLFWRSIFYTYG

SEQ ID NO: 907 - protein, 479 aa, Costanza partiti-like virus
MPLRYIGRTTGFPSRTYDEIYPSEFVLPFLDTIPSKRRSPVTQKLIIDDLKQFSNVTERPDDPLLDLAIAHTTRKFMLPAPVRMKHLNDVFKVESDIWTKSPGLPWTRYGVRTKGQIRDDPARIRDVRKFWHYVKAGEKQTFPDCCAFVRSHICEQDDFKVRAVWGYPATVTFGEAVFAMPLIKGYQRLPVDNTPIAYGLETATGGMKKLKTRFAKVGLHYAGLDFSKFDKTVPAWLIRTAFDILRCNIDFTYYEDHGVADARRMIVMYERIVDYFINTTVQTARGLRFRKDSGIASGSYFTQLVGSIVNCILLYYASLSTIGRMPFDSVFLGDDSFLSTSIPLSISDVSMCLSKFGVEINMRKSQISQSIDEMRFLGYCINHAIPFKPADDLLSSLIFPEHPDDSWDAAASRALGIYYANFGVNRDVSEICWKMVNMAEFTLTFGRGFERMLKHIGYKELDINLPVPVEFLRRLSVFC

SEQ ID NO: 908 - protein, 477 aa, Cucumis melo cryptic virus
MLRDLTDYTFLEFSSEFETLSDTHPHIIRREAEQILKDEFALSELNQAWPLLYDQKLKGWARSFYTLEGHMQAIHAYSNPDTPISSLNQTTYRATIDSLKNELSSLPKAKAFDVLTELDKIPYEQSSAAGYNYIGPKGPLYGVNHKRAIRNALATLWSAIRDDDGGPAYVIRNMVPDVGYTRTQLTDLREKTKVRGVWGRAFHYILLEGTAARPLLETFIANDTFYHIGDDPQLSVPRLLSHVSSECRWLYAVDWSAFDATVSRFEIEAAFDVMRDLIIFPNFETRQAFELSRLLFTHKKIAAPDGRIYWIHKGIPSGSYYTSMVGSIINRLRIGYLWRTMFNREPKMCFTQGDDSLIGDDELVDPVTLAALASQLNWNINPNKTEHSRTPEFVSFLGRTSKGGFNSRELEKCLRLLIFPEHPVLTGRISAYRARSINEDSGFTSNYIQTIARRLRRRYGIAEESEVPRLLQRYIPQ

SEQ ID NO: 909 - protein, 499 aa, Culex pseudovishnui partitivirus
MQRTFKRSEMDRPTFNSLEFVQRVKPHRIRREPWLVDPFVKECLEEMLDTTAVEAFGRYTRSYYTEEGHYANLWKYDSPYISRPNDPIFDRAIEIAAQKVALDPKPETHNWNNLASVPFIAGSSAGWGYIGKKGSPGNHALAISRANAYLLWWRDMRNGISQKEYLYHPDLAWTRTQLSDMESPKIRHVWGKTFENIILEGITAAPLIDAYRASDSPIVVGINTFRRLPLIIAKACSGSPNNPVPQYGIGIDFKSFDSSPQEWLINIAFDILEQNITFTGEMEKLSFEYSKYYFTHTPVVMPDGRLWRKHQGIPSGSYFTQLIGSIVNLIITSYIQLKLYNRTFDTWVLGDDSLFGIPVDLGRPDLNAMARLVSPLGFTIHPDKCTVTRSPRELEFLGHCARGSRVEREDARLMRMVLYPEFPVTGPAMSMSRILGAMIGSAMNSWPILHLYDYMKARYRSLLPADFAFAHDDKDWLVAVVGLPTHHPLLTPSDVFVIT

SEQ ID NO: 910 - protein, 557 aa, Culex tritaeniorhynchus partitivirus
QCFFKQVPALMALLDFKLTPAETFGRAHVYLTDVKYRPPLPFVSKYGGSPPSNITILPEAHKGFSYDMSLPYVDFKAVRACYEGGAADLATRVLRTTRRSHITTDHLYDSVLNYGSPSPPRVTDSVYQRCLEELKEQFDVNTKLEPLSLREAADKIPQNTSPGLPWIQMYPSAKKGEILSKHFDSIADDWKAVENGARKYPLPDCAAFGRSHIGSAETNKVRAVWVVPLTVVAAEARFALPVIDLLTSQTIGHNTAYGCEMMKGGMKWVNDQALWAKNKDPGAKYLMTDYSSFDANVPAWMIRDCFAILRQKFNLTAAEANVFRKCVSYFINTPIQFADKRRILKNHGVPSGSMWTNIIDTMVNFLQTRYCIYTLTRAAPLFDVYFGDDGLIALPGHAIINLEDISATAMEKFGAVVNTKKSYWTNRPRNIHFLGYYNANGSCYKKPEGLVASFLYPQHMQDDWAYTLARGLGVLLASAGDRTIYKIVRQAYIMARRVDGAVEKGFELVSTHPRMVRHLRQMGAEVDNLSTQLFESAEMSIPAENCRKLELNIMLVK

SEQ ID NO: 911 - protein, 596 aa, Curvularia lunata partitivirus 1
MLNNLILGVKRSLAKAIRGNTQDNHVIEAYHHVVDHALRRFLPHNEVEEIIHGYRRSEWNEDALNRDIDKLNSQEHEVLKDEHYWKAIQKVQSIFTPERLLQPIHFADLRLYPWKLSTSIGAPFATSKEWNSYVVDKYHGYQNGFDEDTFLKHYHRDLFAEAHYGQSLDPPMIDARMSKRNLYNEMFFINRKHIHMIKDGRKTNDSGHDLRYWHTAFARQHLVKSDEDDKVRLVFGAPSTLLMAELMFIWPIQTWLLSLKEQSPLLWPFVTLTGGWHRLVNCFQKYIPAYGLIATVDWSGFDRYARHTVIRDLQSCVLRPMFDFSHGYHPTQNYPDTQDTDPQRLENLWNWMCDSVLTTPLMLADGTLIQFRHSGIFSGIFQTQLLDTIYSLQMQFTILSRMGFDLDNVLVKAQGDDSITAIVCSYLMTAHWFLTMFVHYATIYFGAIVNHKKTEVLPTLEHAEVLRYRNRGGIPYRNRIELLAQLRHPERAITYQALMARTVGIAYANCGSDPLVYQICEDIHQYLSKLGVKPDPAGLPSGVRFVQDYLPGQTAINVQRFPTYFETVSRLLDGYEEQPSEGYWPRSHFIGIPGRI

SEQ ID NO: 912 - protein, 596 aa, Curvularia lunata partitivirus 1
MLNNLILGVKRSLAKAIRGNTQDNHVIEAYHHVVDHALRRFLPHNEVEEIIHGYRRSEWNEDALNRDIDKLNSQEHEVLKDEHYWKAIQKVQSTFTPERLLQPIHFADLRLYPWKLSTSIGAPFATSKEWNSYVVDKYHGYQNGFDEDTFLKHYHRDLFAEAHYGQSLDPPMIDARMSKRNLYNEMFFINRKHIHMIKDGRKTNDSGHDLRYWHTAFARQHLVKSDEDDKVRLVFGAPSTLLMAELMFIWPIQTWLLSLKEQSPLLWPFVTLTGGWHRLVNCFQKYIPAYGLIATVDWSGFDRYARHTVIRDLQSCVLRPMFDFSHGYHPTQNYPDTQDTDPQRLENLWNWMCDSVLTTPLMLADGTLIQFQHSGIFSGIFQTQLLDTIYSLQMQFTILSRMGFDLDNVLVKAQGDDSITAIVCSYLMTAHWFLTMFVHYATIYFGAIVNHKKTEVLPTLEHAEVLRYRNRGGIPYRNRIELLAQLRHPERAITYQALMARTVGIAYANCGSDPLVYQICEDIHQYLSKLGVKPDPAGLPSGVRFVQDYLPGQTAINVQRFPTYFETVSRLLDGYEEQPSEGYWPRSHFIGIPGRI

SEQ ID NO: 913 - protein, 707 aa, Curvularia lunata partitivirus 2
MVFSTVRNYLSEFRNTQLQEWKLFQKFGTVAPDPNSDHTDEDLRRLLSRARYLPHESELSSEYQQHYKDTYYGYLESDHMKNQPYEFYEPIKITSVPADRLPAPGLTLLPYKYHPQQVVTATDIVPETGFKIHPLLDYLLNRKYVEYRHYIDKYCRPLGTIDATFSDFNREQQQYPQVPADLVTRIVIVIMHLLNAKPFLPLHYVDTFFAKMPLSTGVSYFYRHSYELKTHAAFSHDPNYRAKQTSKGYMLNAFTEWARTIVHRIKEYALPFSPENLSPSQINDKLREFILEHATLLYTRNHISERDGTLKQRPVYAMDTLFLHLECMVTFPLHIMARSIKSSIMYSLETIRGGCAYMDAVSKNYTSFLCIDWSSFDQRMPWTIVDTFFTHFLPTLLIISHGYQPTAEYLSYPGLTPDKMFKRIFNIICFLRLWYYNCVFLTADGFAYVRQFAGIASGMLNTQYLDSYCNLFLMLHALFHFGCTEAEIMELSVYVMGDDNVMLTHWCENKLYKFMIFFEQHALTHFGMVISTKKSVFTVLRSRIEMLGYRIMFGTPKRDLGKLIAQLCYPEHGPLDKYMSARAVGIAWAAAGMDPMFHEFCFDVYVTFLPYADKEHSTNLDKVLKHLPGFFKILDDPSEFVNPERFPSIEEVRYRYAHWQGELDPHKKWSPAHFIQDPETVPPNSVTMKEYMSEHNICFPDVPRLFT

SEQ ID NO: 914 - protein, 405 aa, Cytospora sacchari partitivirus MP-2014
METTPIDPTLLDNVIEGFHSVDDSTLDPSSRTRGASYDVLESKFQSPGLREIARYNGYGVYSGQSNTDAWVRTTLKQFDRDVYDDIYGFTRKPEGVPGMYKSLKKFSGESKDFRGLNRVQRTAMQHAIAKATKAFRLPTKREPLDWHEVGQYMRRDTSAGVTFMGKKKGDVMEDIYHEARWLGHRMKQNGRGKFNPAKMRFPPCLAGQRGGMSDASDPKTRLVWVYPAEMLCVEGFYAPEMYRAFMEDPNTPMLNGKSAQRLYTEWCVGLRDGEKLVGLDFSAFDTTVPTWLIRVAFKILRQNVEFDTFRGERVSKRDAQKWRNVWDAMVYYFINTPILMPDGRMFRKFGGVPSGSWWTQMVDSVVNYILVSYLAECQGVNPRALRVLGDDSAFRTGLEFDLEIT

SEQ ID NO: 915 - protein, 472 aa, Dactylorhiza cryptic virus 1
MEFTFNDFQADLEDLHETHSERVRRESEVTYYDEYAKNELLSYEPRLYEQVIEGWSRSYYSGQKHLQAIMQYALPNKSITMVDQHDWNQSVIAVKNGLRSLPTVRAFSIESQLDQVYYIQSSSAGYGYQGAKGPLYHDNHMRAIRRAKATLYSAIKPDGEGLDYAIKESVPDVGYTRTQLADITQTTKVRGVWGRAFHYILLEGASARPLLEAAMSSSTFIMVGRDPVKTVPVLLSNTSAQCRWLTALDWQTFDATVNRFEIDTAFSILKEHLIFPTKDDEQNFEFCRLMFIHKKIAAPDGKIYWSHKGIPSGSYYTSLIGSIVNRLRIEYLWRLKFNRGPQICYTLGDDSLIGDDDFYSPTEIANKASDLGWILNPNKTECSTIPGEVTFLGRTSKGNLNHRDLKRCLRLLILPEYQVTSGSISAFRAQSIAEDAGNTSEILNTIARRLKRRYGIADEADVPTYLRRYTFQ

SEQ ID NO: 916 - protein, 482 aa, Dactylorhiza cryptic virus 2
MSTETMHNLNGYEFTGFTHELEPMDSTHVHRIRRESNTTYRDEFAVAILKELNPLLWEQTLEGYSRSYYSMEAHLSSILKYGSPNTPNTALNCNVFEQAVNATRIGLCSLPLVRAINVLTELDSVRYNQSSAAGFDYIGMKGPPGESNHKRAISRAKATLWSAIALDGEGLDHVIRTQVPDVGYTRTQLTLLKEKFKVRGVWGRAFHYILMEGTSAQPLLDAFKRGQTFFHIGEDPTVSVPEILSFTAKHCGWLMSLDWSSFDATVSRFEINTAFDLIKDRITFPNFETEQAFEISRQLFIHKKIATPDGNIYWSHKGIPSGSYFTGIIGSIVNRLRVEYIWRLHKQRGPKIIFTQGDDSLIGDDDYTDPTMLAKLAKPLGWILNPDKTETSRMPEYVTFLGRTTYGGLNTRNLKKCIRLLAFPEFPVESGRISAFRAQSIAHDAGNTSQLLNDTARRLRRNYGVPSLDEVPHYFKPYLNFV

SEQ ID NO: 917 - protein, 441 aa, Dactylorhiza cryptic virus 3
MDTRSTLIGYDFTEFSQDFVQTNQHHPHVVRRPQATTHIDRFALEQIMDINAVYYEQYLQGWSSYYLTSRHLEEIHKYNSNNTSFAVVNQHVYRQAIQSAQNGLRSLPFVRAYDVLTELDSVSYKPSSAAGYDYIGAKGPLNGTNHKERLVEQAVLWSAIKQDGEGIEHVIQTSVPDVSYTRTQLADLTEKTKVRQVWGRSFHYILLEGIVADPFIQAITRSDTFVHTGQDPTISVPQLLSKVAGQSQFIYSIDWKTFDASVSRFEINAAFDLIKSKVSFPNIETEQAFEITRQLFIHKKIAAPDGLIYEIHKGIPSGSYYTSLIGSIINKLRIEYLWRVTTGHGPQVCYTLGDDSLSGDNHFLSPTKMSEVANPLGWYLNPDKTEYSRIPENVSFLGRTFLGGLNARNLKRCLRLLVYPEFPVDTGEISAYRAQSIAHDA

SEQ ID NO: 918 - protein, 516 aa, Davola partiti-like virus
MQVTRCNYPVFTTNVQNAKISGLGTDSTKRLIHHCGDQFHLKQVKDGPLFDNKTRNVLRKYELKPGEINREVKYLDSIRYGGEKDPSQLFQQIERFQQAHAPSFQWNKNYQRALRKVEKLTTPMIQRLKILEYRSDEDIKDALPKPDAHSGFEFIVTGLKEKGMYIEGARDHFEEELHQARMRGSFCKPIITLNRLQCSGAYDAEGNRTGECKKKTRLVSAVDIWVVIAELMWAKPFQRFMASRPWYVGGKKPWELRANVGHNRWHHKQWISLDYSKFDQSLPAWLIRDAFNIIWKCFQGCENWRWLWDIIVNDFIKKAFVGPDGTLFYAENGVPSGSMFTQIIDSICNLIMVHTYFYSLEAKGHKISDFVCIICGDDNLVFLDFDVDFEDLEGYFKRNFGVECNASKCDRGAQTDDPVFLSRFWQNRGEWRLPKELIAKMLYPERFRPYRKNPQLTPEAIVYSYILAFPLGMEELIDVRRFMKDNVQYLRSWSSAIFEYQSGYLSYVMRYENSLL

SEQ ID NO: 919 - protein, 571 aa, Delitschia confertaspora partitivirus 1
MLLSEIPNVYQRALALERRIRVRELYPEGVIPYLARQEYAGAIATPRGPSASVAPRVTETFVAKAPLATYRKQDYLMECTDTMQYIGKMDPYPFNNSVPKFDPWFRHVLKQRAPKVSLHLENTYMRDPCTPDRVMKFMKLFDRSWKRMPTGRVMNQAKQIVEELFAPIGLVEPIDFNFAGWHEILPHLDMSSSPGLPLRREYATQGECLGHIYDKTKRLNHYAKFLHPGAVRAPPCMIGLRPGLIKKAELQEKIKARGVWAYPAEVKVMEMRFCVPFVKRCSDMFGRIPYPIGRNMTKALPFVIDYLLEDQKFGLVTDISKLDTSVGPDWIDWAFSSIKKHFDMGITRSADTRNDNVFEFLHYYFKRTPILLPSGQLIRKVGGVPSGSGFTQIVDTWVTTLATVYTRLRMGHAPEDIKRIFVVGDDMATSVPHDFSIEEFSHIMGQLGFEINQKKVMFSNKGIELKFLGYSKRGGGIYRPIEELLQTAYFPEKFVGNPNRSRQRILGQSLASGLSNSFFDKCNYWMEELVGLVSELDPDEVFIPQKRWMRMVLSLDETPTTANVYDLFHLV

SEQ ID NO: 920 - protein, 582 aa, Dichroa partitivirus 1
MQNLKIIGLHESTKDIKTKDYHNPSYKGIVHRAFKKFLLPEEIQVITDKYRRSIWSEQSFYSNLERIDSPEHTVIKDKHYYLALSEMNKRFSPQEKLKPVHYADLRLYPWRLSTNVGAPYNTSKKWIEHVNNKFKSGSIDNNRMSKHNLYNEFFVNNRLLFHRIKDGQTTDGYGNDLKYWNTAFARLHLVEEDESDKVRLVFGAPTLLLQAEMTFVWPIQTSLLNRGPSVSPMLWGYETITGGWNRLNTWFSNNHPRLSTYFAFDWSQFDQRARHTIIDDIHDVWRSWFDFSSGYYPTQTYPTSEPXSQRLENLWNWMCNAIKKIPLLLPDGRLVEFQHSGIYSGFLQTQLLDSCYNMVMILTILSRMGYHIENIALKVEGDDSIGGMIPTIPPPLFPSFLETFASYANDYFGAILNEKKSEISRTLEGMTVLKYKNKGCVPIRSQEELLAMLYHPERSQALPNLMARAIGIAYANCGMSAKVYRICEDIYTHLQNLGITPNPKGLPGVFQFDELFVTPSTVPPDETHFIPVPPRKAVPSIMDVDLSHFPSYFETIHLLMKDDRQLLTDRHWLTTFFLETPI

SEQ ID NO: 921 - protein, 473 aa, Dichroa partitivirus 2
MVYEFTRYRSELERLPVTHPHVVRRESAVTYRDEFALEQLLDLNPELYPQFLEGWSRSYYLPEKHLQAIMNYSSRDIPMSQIQAQVYQDSVLEVKNRLRSLPSVRAFDIVSELDQVSYRASSAAGYDYLGAKGEKYGQNHLRAISRAKVIMWSVLEDGDTGMNHAITTMVPDVGYTRTQLADLSEKTKIRSVWGRAFHYILLEGVVADPLLKAFSNTDTFYHIGQDPTESVPRLLSEVARDCKWIYALDWKQFDASVSNFEINTAFDIIKEKVTFPNKETETAFEISRQLFIHKKIAAPDGNVYWAHKGIPSGSYFTSIIGSIINRIRIEYLWRLITGHGPKMCFTQGDDSLVGDDILLRLDIIAERANQIGWYFNPDKTEYSTVPEMVSFLGRTYVGGINTRDLKKCLRLLIFPEYPVDNGRISAFRAKSISEDAGNLSEILNKIALRLKRHYGVASEQEVPLYFKTYVPGM

SEQ ID NO: 922 - protein, 616 aa, Dill cryptic virus 1; identical to SEQ ID NO: 601

SEQ ID NO: 923 - protein, 573 aa, Diplodia seriata partitivirus 1
MAPLRFLRKVNRFPSRKEQHFDGFAWDALNSVSPDSKKEYLNHIKSTWHRPSGDDTVLEENLSHYGDPLPRRCYDGDYLAILKKTMDELKPRDKIIPLTLGAAEKSPDLPTTTSPGFPWVTRGFRTKADVLNDKGAVGLIHRTWDSIGRGIPWQLPDSMAFHRVIASPAEKTKIRPVWGYPTEVIIEEARFFLPLWKELKAHCNETDAFYGIGMETALSGHSHLARSFDLSDVKYALSADLTNFDSHASAWIIRDIFSHMSSWFDFSKVCDSEGKVWNVNPDQTCRRWKAMVSYFINTKIRTPTGMRFQKSQGVPSGSMFTNILDTCINAVQMRVCLRRISDDYPVKDYYYGDDSTIFLRTGIDLNALARELLDTFGGILSVDKTIYTDNVENIHWLGYYYRTTGPRRSLDFILASSLFPDRAVPTPIDSAARLLGQLYSCMDPLVAVVFYDAINWLKKTYSFSSQELEDYVRALPSKAMKYLTTLGLSIEEITLPSCHYDPFGDRFIPDVLPKPSSRNFFRRRDPHLPRYAFVAEAYQNRALRTQSFKDFSRYTETFSFYDEFQEDEKYFTD

SEQ ID NO: 924 - protein, 621 aa, Diuris pendunculata cryptic virus
MEYLIADFSRITHFFRDTTNLTYSGTYHFHPRHPEVNLNAYEAHQRVLRSLMDTHLFPHEIQLITDELRRSDMTIEAILADFFANDVEYHEIPFDSHIEYGIKCMLDAFRPPKRCRPVHLLDVQHHYPYKWQVNAEPPFSTDTYFLDNLPTYRDFWNERTSSFDKYVDPEELNRRLRHRNIENLLDTKTPAKFGFLKNTVFSWTRRWHHIIKDGFTDTTGLTSDAYLRDRFIFPMLLHTKTAIVKKLDPNKMRTIWGVSKPWIIAETMLYWEYIAYVKQNTGATPMLWGYETFTGGWLRLNAALYTSHVRFSFLTLDWKRFDKKAYFPLIYKILLGVRDFLDFDNGYAPTVDYPDTKSTWTPHKSQRLQNLWLWTIENLFNAPIVLPDGRMYKRRFAGIPSGLFITQLLDSWYNYTMLASLLSALSMNPKSCIIKVQGDDSIIRLGTLIPPSQHEAFLLKLHALADFYFKASLSLDKSEVRNSLDGCEILSYRHIRGIPYRDEITMLSQFYHTKARNPTPEIAMAQAAGFAYASCGHHRRVYNYLESVYNHYAVQGYTPNRAGLSLVFGNSPDLILPHFELDHFPTISEIQHYYTSSVYRNESQMSKIWPLDHFLYPPAET

SEQ ID NO: 925 - protein, 558 aa, Dragana partiti-like virus
MERNPISELPASEGYPLDLRPPRWDSIAVEVANRFFGKQTISGVLGKYKRSHVTFETLKDDVFEYNVRTKPRVLNDPIYVACLQSVRREFVPQVPIVPLTIGGASKVSNVPKDKSPGLPWKERGYRTKAEVLADPKAMGEIHGKWAMVGKGYHIGLPDSLCYFRSQICSLDTNKVRATWGYPTGVFIEEARFVYPYLHFLKNRRDDYPLAYGVEMGKGGMGYIDEMFSRSGEDTKAIMMDWSRFDKNVPAWLIRDAFSILKEAFVTDRVVDSEGLQWEVNPEITNNRWSKMVNYFINTPFRMPDGTRYKKSHGVPSGSCFTNIIDSIINAIITRYCVYQTTGFLPAYDIYMGDDSVVMAHGCVNLDAIARVAYDKFGFILNTAKSYVTTQRANIQFLGYYNDRGYPIRDQDFLIASFCLPERVQDPNPLFTAVRAVGQMWSTLNADAAQRWLEIIMFLEKEHEFSKNWFKEWMAEKPNSLKFLRLHGLDATTFPAPGYFDKVTCPMAPPFRPDRRRPVHRITSVEDLYFMYLDSSLEDFYFESHKEGEAPDVDDDINT

SEQ ID NO: 926 - protein, 586 aa, Drechslerella stenobrocha partitivirus 1
MKIITTIKQALASFFLPYGVQEPHGLNINFEFAGYADPKIKVSMNPRFEEVYQDYQTWLRKYVVKHFPGPMAEKIMHGYHHPVATIPFMVDNLKKGDLPDHPVPHDHHYMAARRAAADAFRPPKRIRPVHFADLRYYNWNWHPNVEEPYYSDPKLQQYVEHCYSLGLIDDARLSFGNLKDFVFMDTRHYLHLIKDGKITDPNQLWPIMKIHVKPALTTPDETKIRVIYGVSKRHILCQAMFFWPLFRYYIESKASPLLWGNETFTGGMSRLHDMMSIPRLYFKTFVTIDWSGFDLRSLFSIQREIFDDWREYFDLENGYIPTRTYHSTKTDPIRMERLWNWQRDACFNMPFVMPDRTTYNRRYRCIPSGLFVTQFLDSHYNLIMIYTILSRMGIDITNLKIEVQGDDSLTFLRFYLPPNQHEQFKLDFQKWATYYFDHVARPEKTSVHNTPQGVEVLGYTNNNGYPVRDQIKLMAQLYHPRNVDKHHWKSLLMAKVCGFAYASVYQDRTVIGFLRDIYLSLERKGFQPKAGRVMRDVVLFGETEFEVPIDHFPTEMEVTRHLRFPYARTDKDRDNYFPSWHFSATE

SEQ ID NO: 927 - protein, 470 aa, Drosophila biauraria male killing partitivirus 1
MKYLGKASGFGQRFEPPSPSPYLKFLAPLTGDYQRSPVTLAGIRDDIKKNISTNARRPATPLFDEAIRRTFRAFQLPDRIPMLHLNDVFQKDLPIWSSSAGLPWMNLGYKNKGEIRKDPDAIQRVRWFWHRVKAGESIRLPDCCAYVRAHIVKTGETKVRAVWGYPATVTFGEAVFALPLINAYKSGRYPIAYGYETGLGGCKKVLHEFKGKNFLGIDFKNFDKTLPDWLIEIAFDVLAYNIDFSKYEEHGTARVEAMLRMFSILKNYCIKTKIRMCNGERYQKRWGLASGSYFTQLVGSICNYLLLTYACLKYSVHINKILVFGDDSLIGTDALLTPDDIAMALEPLGMTVNVSKSGHSAYLGRLTFLGYSINDGVPTRGRDKTMASLVWPERHDKDWIFAASRAHGIAFANMGVDLLVDYWCRRICSYLPYKLQLSRDQQRHLEILGFSSIPDKIPNCYEFMRRLGFC

SEQ ID NO: 928 - protein, 586 aa, Echinochloa crusgalli partitivirus; identical to SEQ ID NO: 738

SEQ ID NO: 929 - protein, 412 aa, Enontekio partiti-like virus
MPFTTSPGLPYIQQGYRSKRDAWDDHHQEIKHSHEMIRKGHSPTMPDCAAFARSIVSEKPKNKVRLVWAYPLDMVLLEAKYTQPLLKAMTAQEIGTSVAYGAETMRGGMEWLHRQLTSIPQQSYICMDFKSFDQTIPPWLIRIAFDILEECFTTSEVEDVDGVHRTNARAVAREWRQIKHYFINTPLRMEDGTRYQKTGGVPSGSCFTNLIDSIVNLIVTRYVMRTCTGHNPSFLTVLGDDSVIATQGLVNLNDISRVTKEKFGMIVNVEKSYWTTRVDNVQFLGYYNYFGFPARDEEILLAGLLLPDTSIDESLELTAARFLGISQAHCGNNIQILLLTEFLFRELYLRGKDFVVDAHKLYHIQKSFGWLPAAGEKPEPLPPIHELRQAVLPKRTCIKLRRGVNLTNYEGV

SEQ ID NO: 930 - protein, 606 aa, Entoleuca partitivirus 1
MKFSNIKILGYKPEFAVPIHGRDPNVSNPLTDIYNKIVDNALNRFLTPDESDQVINGYRRSAWNEDALKEDINRLDSDEHPVDKDEHYEKALNHVYNLIKPEKPLQPVHFSDLRHYKWRISTNCGAPFNAMKRWKDYVVAKFKYFQRSQPFENIAHRDLFTEAHESSEPLEISDTRMTKHNLYNELFFIARKVIHRIKLGFTSNSQGESYLYWNTAFARQHLVSKDEPDKVRLVFGAPFTLLAAELMFIWPLQAHLLFMGEKSPLLWGYETILGGWYRLRNYFSRVIPYYGTVFTCDWSGFDRRARHTVIRDIQSRIMRPMFDFSQGYHPTYKYRDSSNPDPRRKEDDLPISEKLENLWNWMCDAILRTPLLMPDGTLLEFQHSGIYSGYMQTQILDSLYNMVMLFTILSRMGFDISRLKLKVQGDDSICLLLQLFIQLAAGFLTLFKHYATYYFGAVMNEKKSELLPTLDHAEVLKYKNKCGIPYRDELSLLAQLRHPERSTTPEALASRCIGIAYAACGQLPRVYMICEDIYNYLTQVRGTIPKQSELDFYFRYIEMSSGQIFRPTAARFPSYHETMSHLMDAHSPVAPSHWPLDHFIGRPGQH

SEQ ID NO: 931 - protein, 751 aa, Entoleuca partitivirus 2
MPFNTLRNYLAEKIIRVRNEWKIFQSTDQDPEQTLEQNQDSDTTRMYKLKYYNTKDEAKTRMLNQEYSTLVEAMRTDYQTRHQPFELHKPVDPDAPFREDRTPAPGIKTVPLFYHTGHVIHANPETSRPLNPDNETDAAESYIPGDIDFGPEIDPHIRCLLEQKYPSYLPYVHKYCRPAGTTDATFRDFNKEQKPSAPIDPARKEQVLKHVFRLLDATPYLPLHFVDTQYAKLPLSTGTGYHNRFSFRQKAHAKYSHPPEYAEKPTSKGYFYNATYDMARTLIHKIKETGVPFNFHFAPEDQDVSDEQVRDYIAKCDNFFNDYPTLLFTRNHISDREKTLKVRPVYAVDELFIIIEVMLTFPLLVQARKPSCAIMYGLETIRGSNHYFDSLARAYSTFFTIDWSGYDQRLPRVITDIYYTDFLRRLIIINQGYHPTYEYPEYPDLTEHNMYTKMDNLLHFLHLWYNNMTFLSVDGYAYRRLFAGVPSGLYNTQYLDSFANLFLLVDAMLEFSFTDEEIEKILLFVLGDDNSGFCPYDIGRMHRFLQFLEKYALARYNMVLSATKSVLTTLRSEIETLGYQCNYGQPKRPLDKLVAQLCYPEHGIKFSTMSSRAIGICVAAAGQDKKFHSFCNDIYTMFSPFWKPSPGLTLDMKRRFFADEEVDLPFLSDDTLMPFPSFQEVRKMYATYQGPLSFAPKWNFAHFIMPPDYCPTTRKTMHDYEQEHSLYVRIAPTFATSEPSTKISRDFFYVI

SEQ ID NO: 932 - protein, 555 aa, Entomophthora partitivirus D
MYRSREKELKIKDLGEAKRRQVNQIHPRVKINRDVSKAMKQLPDAQGFAMNMTPPREDKKARIACDTYFGAELVSKITSKLHRSTINYDALIDDLFEYDREHVPRGRMSDESKVIYKMVLESIKDDLGKPNLTPMTFEEVRSLPDFPGAKSPGLPYKNQGFRTKSEVFDDPLKLKNLKSTWSDVGLGKHVVLPDVCLFARAQIARYPEKKIRATWGYSFDVYMEEARFFYPIQEFIKKHEHNFPIAYGLEMAKGGMSSINDMLTRNRGCKYVISDWSKFDKTVPLWLIRDAFQLLNGLICPEVMGAHSKRRWKKIVDYFCETPIRTCKGERFMVIGGVPSGSCFTNIIDSIINCIVTRFLSYQTTSEFPLGEIFLGDDGVFVMKNLVCLEDFASVALLYFGMVLNLDKSYVTTNKQNVQFLGYFNLDGVPFKNLDYLIASFVFPEHRRTKLIDTSAAALVQMYSGFDPGYASVWLKIIHLLAEFENTDPFSLQEIVLRLRSQEYRHKYLAHVGVKVENMTVPSLHSSFIHEVLHHPNCPIKLENRNYNYKDLCNR

SEQ ID NO: 933 - protein, 573 aa, Erysiphe necator associated partiti-like virus 1
MPIKYLRRVNRYPAQTGVFFDTFAAEAMVAVSPDSDLPWFSSITKEWHRPSGDNRLLDDGLLKYNVTTPKRCYDGDYLAILKKTLDELRPSKRLIPLTLGAAAKHADFPKTTSPGFPWVHQGYHSKGDVLASKDGTGHIHRAWDMIGKGTPWSLPDSMAFHRVVASEVTKTKVRPVWGYPVDVVLEEARFFLPLLAYLKDEVNVRDSFYGLGMETARSGHEHLARSFHQAGIKLSLSGDLSNFDARVPAWIIRDVFSLVSDWFDFSKVVDSEGKFWNVNVGQTCRRWKAMISYFVNTKVRSPSGLRIQKSSGVPSGSMWTNFIDTCVNAVQMRVSLYRVTSRLPAKDYYYGDDSQVFLSCDSISLDALAEELLRVFGAILSVEKTILTDNVENIHWLGYYYRPGGPRRPLTFIVASTFFPEREVDSPLESCARLLGQLYSCMDPHASVRFYDAVRYIMKCYCLTKDQLDDYVSSKPSKAFKYLATLGLEVSDIVLPDCFVDPFGDRYIPSVMARPCPRRFVPYRDANLPAFAFIPEAYQNRNLRQKLFKDFNLYTQTFSFYDEFDLDFPYFTD

SEQ ID NO: 934 - protein, 358 aa, Erysiphe necator associated partitivirus 1
MSKSNPIRDYLSERNLRIKTEWKLFQQSQNSDESLSQLTSDSDLKRLYHGSRHYLTEQEKSHALQSQFDQILHDLQIKNKDKHEPFEYFTPRLLPVPSNREPSPGITLLPLQYHVGQTVTTSEHLTEQGFPLDPILTTLLTTKYPQYLAYTQKYCRPLGTTESTFADFNKPQIHISPSLPERKERILKHIFRYLDAKPYLPVHFVDTLYAGLPISTGTGYHNRHSYKIKAHARYSHPKEYASKPTSKGYFLNAFLEQARTIVHRIKLSGLPFPWTLPSNPTDQDFTALHSRLNSFINEYPTLLFTRNHISDRDGKLKQRPVYAADELFITIETMLTFPLLVQARHFQCCIMYGLETIR

SEQ ID NO: 935 - protein, 573 aa, Erysiphe necator associated partitivirus 11
MPLKYLRRVNRFPIQDERFVDTFASEAIAAVSSESESEWFSNIAKTWHRPSGGGQLLDDGILKYDIHTRHRCTDGDYLAILKKTIDELRPAERIIPLTLGAAAKHPDMPTTTSPGFPWIHQGFKTKGEVLTDRAANGHIHRAWDMIGKGISWSLPDCLAYQRVIASEQTRTKVRPVWGYPVDVVLEEARFFLPLLAVLKDLVNDKDSFYGLGMETARSGHEHLARCFASAGIQLSLSGDFQNFDARVPAWNIRDIFSHVSDWFDFSKVIDSEGKIWNVNTDQTCRRWKAMVSYFINTKVRSPTGLRVQKSHGIPSGSMWTNFLDTCVNAVQMRTALYRTTGALPAKDYYYGDDSQVFLVNKHISLDAVAMELDLTFNAILSVDKTILTDNPDNIHWLGYYYRPGGPRRSMEFILASTFYPERQVATATESCARMLGQLYSCMDPHASVRFYDAIRWLMQKYSIDKTTLDAYVSDKPAKAFKYLSTLGLDMSDITLPDVFTDPFGDRYIPAVLARPCPRRFTPYRDINLPDYAFIPEAYQNRSFRPSGFKDFNIFKTTFTFYDEFDADEAYFTD

SEQ ID NO: 936 - protein, 583 aa, Erysiphe necator associated partitivirus 12
MQPTTNLKVIGHLPKNTKVFAFHQGRQDALRNMSEKLVKKAIHMECTPELAHKAIHGFRRSAGGDEIAEKDFLKSDQPYHPVPRDHHYKKALATCERLFRPSRRLKPIAYPDLRYFPWTLNVSAEAPYSYSQYWARELRRMQAEGITLDSKPTFHNLYDEIFHDNRSHIHTIKFGLAPFWDKETGKPVPYKWNTLHARSHTVKADKDDKIRAVFGVPKLLLMAENMFVWNLQKEYLNKRVQSPMLWGYETFKGGWQKLWRDLYKTNFNSVLSADWSGFDHNALHEVIDDVHSMWRSWFDFDQGYEPSRSDTHDYHASKTEEWKIENLWTWMTHSIKHTPILGFSGTIYEWSYNGIASGFQQTQLLDSFVNAIYLLTCLSACGIDIDAPGFNLFVQGDDSLTTFSERVFQFGGKEFLAKLAREANIRFNAVLSVDKTTHGTSLNDVEVLSYRNNQGIALRDPAELLAKLLYPERPKRLGGTAASAIGIAMAAMGSSPQVYNTCRNVYNFIVYELEVEVDFKEFRAYSTVHQSAAEEALALQPTRFPSYNETLCYNYDFSTRSEKEKQRLWPTKPTGNGFHFLVN

SEQ ID NO: 937 - protein, 539 aa, Erysiphe necator associated partitivirus 2
MEDFTLEPTNHYVLAKGSHLVDALHLRPAKPGSATSEDVIPSNFESPNLTEIAKYGGYSTYSSNSNTDPQVRESLKLYSRDIYEEVRGYTRRPQGTPGMYTALKKFAGEKNTFRSLSPSQQASMRRSIAKAKKSFKLPYKREPLDWHEVGQFLRRDTSAGSTFMGAKKGDCMEEIYHEARWLGHRMKQDGKSSFNPSKMRFPPCLAGQRGGMSEIDEPKTRLVWIYPAEMLCVEGFYAPLMYRDYMNDPNSPMLNGKSAQRLYTQWCCGLREGETLYGIDFSSFDTKVPAWLIRVAFDILRQNIEWSTFDGKPVNKEDAQKWRNVWDAMVWYFINTPILMPDGRMFRKYRGVPSGSWWTQMIDSVVNHILIDYLADCQDVEIRNLRVLGDDSAFRANDQFDLEIAKQDCEPTGMVIKPEKCEKSLDPSDFKLLGTKYRDGHVFRTTDEWFKLALYPESSVLSLEVSFTRLVGLWIGGAMWDKVFCEFMDYYQTSYPVPEEGWFSKDQKRWLEVVYSGRAPRGWTTKRSLFWRSIFYAFG

SEQ ID NO: 938 - protein, 539 aa, Erysiphe necator associated partitivirus 3
MEDFTQEPTNHYVLGKGSHLVDALHLRPAKTGSTTSEDVIPLQFEDPNLREIAKYGGYSTYSSNSNTDPQVRESLKLFSRDIYEDIRGFTRRPQGNVGMYTSLMKFAGGKNTFSSLSPSQQASMRRSIGKAKKAFKLPYKREPLDWHEVGQFLRRDTSAGSTFMGAKKGDCMEEIYHEARWLGHRMKQDGRSSFNPSRMRFPPCLAGQRGGMSEIDEPKTRLVWVFPAEVLTIEGFYAPLMYRDFMNDPNSPMLNGKSAQRLYTEWCCKLREGETLYGIDFSSFDTKVPAWLIRVAFDILRQNIEWTTFQGKPVDKVEAQKWRNVWDAMVWYFINTPILMPDGRMFRKYRGVPSGSWWTQMIDSVVNHILIDYLADCQEVEIRNLKVLGDDSAFRGNNQFDLEVAKIDCLPTGMIIKPEKCERTLNPSEFKLLGTRYRDGHVYRDTSEWFKLALYPESSVYTLDISFTRLVGLWLGGAMWDKVFCEFMDFYQTSYPVPEEGWFSKDQKRWLEVIYSGKAPRGWTTKRSLFWRSIFYAYG

SEQ ID NO: 939 - protein, 572 aa, Erysiphe necator associated partitivirus 4
MEQLIQSMNKLTINSNYVFIGDTDHRQLPVQTNQFALEAHKKTVLFSMAKHLFTHEVEQVLSLRRPDPNDINLVYSDFFAGDIPPHSIEKDDIYYQALNHVTDLFCPPQPVRPTHIFDVRYHYPHERSSNAEAPFSTEKFFRDKAPRPPPGTKINLFSVGNMYDVIFDWTRHFHHKIKQGANYHDYLWYIQLHNRTSLVGPSDPDKIRSVSGFPRPQNIAWIMFLWPYLSWLKTRDPRTSPMLWNFETNLGGWFRLNYLLYTGFHARTIITLDKSKFDKFYFFAIQDDIDNMIENFLDLNHGYIPTTDYPDTSKDWTLNKAKRLRRLLHWLYYSFRACPTVTPHGQMFRRRFAGMPSGVFPVQLFDTIYFAITDTDVLLRMGISPAQIRLRKGQGDDIITQLYICIPPNAHDSFLSTYSRIDNERFGSTISVTKSEMRNSPQGAHVLGYRNKNGLPVRDTVDLIGSLYHAKARQINESISMSIAVGIAHASLMHDKRVYAICKDVYYYYANQGFTMNQNWLRRFYAYTGISLSHVTDFPTPDEICNKLFDFSFEPRKQTVDYFPRSHFLSEF

SEQ ID NO: 940 - protein, 548 aa, Erysiphe necator associated partitivirus 5
MESSKHKNFLLERLSKFRPHVPSINPFSTAKHQATVEHAIRRYCYPQQIETILHGYTRHEVTEELILQDFFSGDVPDHHVPRDEHYLKGLDYTRHFFAPPKPVRPVHILDVQHHYPMKNKPNAEAPFSTEKHFVDMIPPNTKTSVGNMKPIIFDHTRRWHHEIKNNAEPAHRYFYQMLLHIKTALTTTASPAKARSIFGVPKPWIIAQIMFFWPLFAFYKSHKGSSPLLWGYETFNGGWMRLNYELMHNYMRTSILMIDWKRFDKFALFNVIDDIFDIQRSYLDFSRGYVPTIDYSNTADQWDATKEARLQRLWQWTLNAFKQTPVLLPNGEVYSRQHAGIPSGLYTTQYLDSMYNCVMLITILSAMEIPLSKEMIIKLMGDDSLIRLLVCIQPNLHEDFLLKMQHFATTYFQAIISVEKSKMTNRPNGAEVLSYINHNGLPHRASDSLLAQLYHTKARNPTPGKTMASAIGIAYASCAHDKQVYHVCKDIYSYYLSQGVDPDPTGLTLALGEDPFGLDPSGISLDHFPSQHEIQANLTALDYVSDSV

SEQ ID NO: 941 - protein, 523 aa, Erysiphe necator associated partitivirus 7
MADSFVDDDETFGNDNPSVWDYPFRYITETKRFPDYKRGILRQTQRYDPFVDVALKHFDPELREEIKGYTRSPGDEWDLADKFRKYDTATLSHPTGNARFTAAYDQAVKTVMSEFKLRAPVVPHWILDIDLVKSTSSGYPHFQRKGDIFDQLRQEGRFHFHHLKLFDLHRCPLLPCVASTRGGLAEASDPKTRFVWMYPAAMTACEAVFAQPLIDKLYSEKADLLLTGVDSKFRIQKFMSLLSDEEGTSGVGLDFKSFDTFRNTRLIRDAFEVLRQNIKFGYYYDKVHGLQKGRSGVDVRAMKAFDNIIEYFIHTPMLLPNGRCVTKHHGVPSGSHFTNLIDSIVNRILITTFALYSDIPIKHLKTNGDDSAFTASTTYSTGILEKAARFFDYFFGMTVSVAKSCVATGPSDMHVSGTTWSQLRPHRPTTEWFMLAAYADTYIARPFDSFQRLLGLGIAGGFGNAKFVQFFSYFQSGYDCRHGPNILNWNKLRWLEHAFNITELPLVYKQGSRTHTRLRLLAT

SEQ ID NO: 942 - protein, 452 aa, Erysiphe necator associated partitivirus 9
MSDRVVSVRQYLNTKYNIRMIDNQFPKFHNLYNEIFQYNRTLVHQIKEGHPAFWKHGTPKPYYWTTLHARSHVVGKDEPDKIRAVFGVTKLLLMIENMFIWPMQALYLNDPTKGRLLWGREMIRGGWKKLFTEIHENGKPSAFLSLDWSQFDKRLLFELIDEVHSIWRSYFSFSRYQPTSFYPNANPRDPQRLERLWQWMCYSVKHTPIRLPNNELWSWNYNGFSSGFQQTQLMDSFANMIMILTALSSLGINIKSEHFWIRVQGDDSLIALYEQIWLIYGPNFLTMLGDAAAFYFNAKLSVKKSQFSDRLNRMSVLSFFNDFGLPYRTDEDLLRHLFFPERNQDLARTASAALGLAYAASGCSLRFHSLCEYIWTKLVIEKGFSPSEESIQWLERAGVFTELDIKAMLKEEFPSFIMLRANVWSHTPRSVQERERLWPTEPGTRGRFYFLT

SEQ ID NO: 943 - protein, 575 aa, Erysiphe necator partitivirus 1
MCFSQDTNLERLGKQPINRRLRRQTERVSKSEQTFVFKATKKAIFKTCPPDIANQAINGYYRSPTDNTSAEEDFFKTDQPYHDIPRDHHYHRALRVVEKMFRPSRRLRPIAFPDLRYYPWSLNVSAEAPYRESDKWYEYVKQKHREGEVDNERLSFHNLYDELFSENRRLIHLIKDGEPPFWTDDGNPITYEFTYLHSRAHMVSSDKPPKIRAVFGVPKLLLMAENMFIWNLQKEYLNRRVNKGPLLWGYETFRGGWTHLVYRLCGKQINSILSADWSGFDHYALHETIDDIHNIWRNWFDFDLGYEPSVSNNHDYSHTETDETRIQRLWEWMCYSIKHTPIKAESGNMYRWRFNGFASGFQQTQLLGSFINAVYLLTCLSACGINIDSDHFQALFQGDDSISTFPERVDFTTFIPNVSNEAKRRFNAILSVDKTSYGRWFDGIEVLSYTYRGGFAIRDPAGLLAHLLYPERPKRANEIAASCIGIAQASMGIRCVYDACLDLFTFLVKELKIEPYFPETDVNKPFKWWEPTLRYFPTFEECVLQNFEVAFRDESIKNRLWPTKPVGNGFYFLSP

SEQ ID NO: 944 - protein, 577 aa, Erysiphe necator partitivirus 2
MCDTNLDYLGKISVRKDKHRFDRPIPKKTRLHVQKIVIKAIYKYATPELADRVINGYRRSDASDESAEIDFLKTDQPYVDLPRDFHYCRSLRVTEQLFRPSRRLKPISFPDLRYYPWTLNTSAEVPFTNSKYWEGIIRQKQSDGDIEDGATSFHNLYNEVFHINRKHVHIIKRRLPPFWNTNGEPEPYLWSSLHTRAHLVKSENPDKNRAVFGVTKLLLMTENMFIWNLQKEYLNQIVKSPMMWGFETVRGGWMKIWRETHKDGPPSSVLSADWSGFDHKVLHEIIDDVHIMWRNWFDFDQGYEPTNTYPNTTTRPEQIQNLWDWMTYSIKHTAIRCQSGKTYRWKFNGLASGYQQTQLLGSFVNCVMLLTCLSSIGINIEAPTFKIFVQGDDSLVTFNEMVFIHETKPFLLKLEKDARRRFNADLSVEKSFAGQSLSDVEVLSYKNRSGIAYRDEAELLAHLLYPERHRDLAATAASAIGIATAAMGCSRTVYDICHDVYNFIVNELGISPHPRGVHWMTRVHIPISIDVFPSFQQTSAQNWCLTERSKSDNNRLWPTQPIGQTDDKPDGFYFLNH

SEQ ID NO: 945 - protein, 584 aa, Erysiphe necator partitivirus 3
MATTNLLRLGKVPRSRKFNQPLNRRPRTNRIRQRIIKRAIYKICPIDLARKVIYGFKRSQGTDDVAETDFLRSDVPYFDMKRDYHYSRALQVCEKLFRPSRTLHPIAFPDLRFYPWNLSVSAEAPFSVEKKWTTIIRTRQSDGEDMDGRLTFHNLYNEIFELNRNLIHQIKEGDKSFWNEDGTPRPYWYNTLHTRSHLVKSNEPDKLRAVFGVPKLLLMAENMFIWNLQKEYLNQKIQSPMLWGFETFKGGWLKIWNRMYARKCSTFLSADWSGFDRFALFECIDDIHRMWRNWFDFSKYEPTQAISGPPGIQLSYPNSITNQTKIERLWNWMCYSSKYTPIKGQSGQLYQWQYNGIASGYQQTQLIGSFVNCIYMLTCLSELGINIESENFQILVQGDDSLTGFPEIIQQNDIPNFLLRLAKVAKSRFNANLSVTKTTAGESLNNVEVLSYSNTNGIAFRDEAELLAHLLYPERFQTLEATASCCIGIAYASMGCSKYVYDTCHDAYSFITTQFKIEPDFNYLQDFFRVRGSPLTDDVHIPRFPTRDECFLQNFEVRHRSESEKQRLWPTKPTGNYGFHFLND

SEQ ID NO: 946 - protein, 372 aa, Flumine partitivirus 1
MTSFYYLNHHAKERPLLQEPDLVNFRLERISKFRPNVPQVDHIAYAKHQRTVEHAIRTYCYPKQIEEILHGYTRHEVTDEVVLNNFKLGDLPEHITPRDKHYEVGLSLTSDLFRPPTPVRPVHILDIQHHYPLKNKPNAEAPFSTEKFFTDKIAPGLKASTGNMKPIIFDYTRRWHHEIKNKTEPDHRHFHFMLLHIKTALTVSTSIPKTRTIFGVPKPWIIAQIMFFWPLFAHYKSFKGSSPLLWGYETFNGGWMRLNYELMHQYLRTSILMIDWKNFDKYALFNVCTDIFKIQRSYIDFSRGYMPTVDYPSTDKDWNEDKAQRLENLYQWTIDAFSQTLVLLPNGEVYSRLFRGIPSGLYTTQFLDSMYN

SEQ ID NO: 947 - protein, 355 aa, Flumine partitivirus 2
MMAELMFIWPLQTSLLQRGETSPMLWGYETTTGGWSRLYKWAHQVMPKYDFVATLDWKRFDREARHTVISDIHTLIMRPYFDFSNGYQPTIYYPDTSGTNPTRLENLWNWMTDATLTTPLMLPDGRMLRFRHSGIYSGYFQTQILDSMYNSVMIFTILSRMGFDLKKVAIKLQGDDSIFLMPYPYIFLEKSFLQLFADYAQQYFGSTLNMSKSEILPNLERAEVLKYRNHGTMPYRDELELLAMLRHPERTVSLPSLMARSIGIAYANCGNHSRVHHICEDIYNFLEKGGYHPDPYGLPGGLRYRQNYIPSYAQVDITHFPTYAETVRLLQEPARDMLTEKHWPQRHFIGIPGKS

SEQ ID NO: 948 - protein, 740 aa, Flumine partitivirus 3
MPFNAVRNYLLERLTRLKQELKAYQSSNRDPTATLAISQDPDFRRYYHNVRYDPDYQTKFLILNKEYSTLVEAYRTDNALKHQPYELHQPIPLDAAPIPDSRQPASGIKLLPLMYHYGHVIHEPDDAPQTVSPYETAALPESSYVNSFGYPLDSRLFKLIYTRYPEYLPVVNSYCRPLGTVEATFSDFNKEQKPSDPIDQSRKEDVLSHIHRFLDTKPYLPLHFVDTQYCDTPLVTGTGYHNRYSFKQKAHAKYSHPEEYSNLPSSKGYFYNATYENARTLVHMIKLHGLPSILDFDLNDSSLTDEQVQTYISRANDFFNDYPTLLFTRNHISKRTGPLKVRPVYAVDDIFIIIELMLTFPLLIQARKPSCCIMYGLETIRGSNHHIERLARSYSTFFSLDWSSYDQRLPRVITDIFYTDFLRSLIVINNGYQPTYEYPEYPDLDEHHMYLRMNNLLTFLHTWYNNMTFLLPDGFAYRRSFCGVPSGLYNTQYLDSFGNLFLIIDAMLEFGFTHTEIDEFVLLILGDDNTGMTNISFDRIHDFITFLESYALTRYNMVLSKSKSVLTTLRSKIETLGYQCNFGSPKRDISKLVAQLCYPENGLKPHTMAARAVGIAYASAAQDHMFHSFCQDVYNIFRSEYKPDVRANLFLQRQVLQNLSDGIPDLATPTVPAFPSFYEIRDMYSTYDGPLSYAPKWNYSHFINDPDASPPFSKTMRMYEEENSISSKPAPTFETDVLSI

SEQ ID NO: 949 - protein, 479 aa, Fragaria chiloensis cryptic virus; identical to SEQ ID NO: 594

SEQ ID NO: 950 - protein, 537 aa, Freshwater macrophyte associated partiti-like virus 1
MVTLQIHCLRQAVEERHRVYNQDETVYLQSNHFRSTLELKRRPFIYGAPPKSRIAKYFMGHSLGFDITDEIERLYRRSTITEDSIHQEVRDFDLFDPQYVNVNEVTWKTTMSVVGQMFRLKEKGRPLHLKDLMDVEEVSASLPWSHSPGLPYTDAGVHTKREAYDMDVDKLRSRLHNFKTGKTRLFELPPALVSVRNHLILADGPDKVRGVYAYPFDMWAIETMMCWDLIQRYKQEETAYAMQATPLIGGLNHITSNAYKYGNDFSKFDKTMPEWIIRQAFIILRQNIDLTKYRDWGVPDSTAMYRLMRLIEDYFINTPLVTPTGRAFQKKNGIPSGSMLTNLIGSICNALCTVYGLLRTNAAFNQKACKFFGDDSVIVFHRNAKPTDWNSEEFDDVIYDSFGLISNSNKSTESFGGTLEFLGYTVQDSNSLPRRDITPLLAGLMYPETRDRSVNDFFQRLIGMSYAGAFNRKFREACLRMEHTLRSTDQIDWVHFHFKKSISRMMRQLGVPILDKPTCCQEQDLYSLVRRVGILVI

SEQ ID NO: 951 - protein, 478 aa, Freshwater macrophyte associated partiti-like virus 2
MSGLTRLAVIDTRTVREQFRTHVDPFIAEAFQATLPTGELSKLNNWSRSYYSVQGHIDSIMKFNKPILPAPTNKEWHNSISENFALFATFPKVYSLSAKTDFDKVKYHQGTSAGYGYHLNTQPNPTHKGLPNGPNHSRAKQIASRIVHECKEQHSKHKFLDYLETVPDNSTPDIAFTRTQLAELPEIKVRNVFGECFHYVILEGLTAQPLINMFMTIDSFYFIGEDPLTAVPKLINNLSTDDRLFLSLDWSAFDASVQPYEIEHAFDLLRSILVFPDEESDLVFQYVRQLFLRRKIASPDGFLYMRYGGIPSGSYFTHLIDSIINMTRIKYLLKRIHASYDVLKTHGDDALVEITSTHDDLTQLIDEASSLAWHINSDKTLLTMTRNRLIFLGRSSVQGQNFRDYDRCLRLLYFTEYPVNHPQISIARLKAIDEDSGFGIPMIPNVYNYLLTKYGDHSIPLPREFRRFYDVFYGNISI

SEQ ID NO: 952 - protein, 484 aa, Freshwater macrophyte associated partiti-like virus 3
MSFGLRVVGNVNPREPRPEFVTYIDPFIDEAIKLILPVGIRNELAGFSRSYYSMQGHIDSILRFDKPMQFAPSDNEWRSVVQDSLREFARYPRVSALSARKDALSFAQVRYHQGTSAGFGYRENPGQYPTHKGPPDGPNAKKARRIASRIVYECKEAHKQGRWNEFIENLPNDSTPDVAFTRTQLAELPNSKVRNVFGECFHYVLLEGLFAQPLIEMFMNIDSFYFIGEDPITGVPRLIDSLSEQYSQFVTIDWSGFDASVQVYEIDLAFDLMESILDFPDHDTRLVFYYVKRLFISRKLASPDGRLFLRYGGVPSGSFFTHIVDSIVNMIRIRYLFTRVGISVAFIRTHGDDGLVVPGEHIETLNDVVAEANLRLWKINIDKSKLVQLRSEIEFLGRTSRSGVSYRDSLKCLRLLLYPEYPVDDPQIAIARLKGIDQDSGHRVQYIPEIYRALKTKYGDEELPLPAKFQRFSLNIMNASPIGI

SEQ ID NO: 953 - protein, 528 aa, Fusarium cerealis partitivirus 1
MNKSEDGPKTSRDDPWDARFRYLTEGRLMPNFKRGVVRQMQMYDPYVKTALEHFDDGLRKSLKGYTRRPGDEYAMLASLKKYDTPAYTKPAQYNTDKRFATCYDAAFAQVSKDFRLQHKVIPTFVESVDLVEDTSSGYPHFTRKSSIKETILKEARTYFHYAKEGINHTPFLPCSVGVRGALSDADNPKTRLVWMYPAAITASEAVFAQPLIEKYYSEKADLFLTGTNARSRLANLASHIDDDANIGVGLDFSSFDTFPVNDLIRKAFAILAENIEFGYYWDPETGTQIAGTTDSRDFNRVKRRAEIAYSTLIEYFIHTPLLLPNGRTVYKHHGVPSGSHFTNLIDSIVNRLLIKTFELYTNRRFKHLMTNGDDSAFLVHHEKAENILEDANVFFLHCFKMLVKPEKSVVADLASDMHMSGTRWNQALPYRPTQEWFQMALYPTTFVTDEMLAFQRLLGIGIAGAFRDPTYCRFFDFFQSAYDCRKDKMLNWRRFKWLEYGFGIEDLPKVYKQKSRLAQKLRTLLFNP

SEQ ID NO: 954 - protein, 574 aa, Fusarium equiseti partitivirus 1
MQTEHLLTIQNVYQRALALEKRIKLRALYPDGIVPYLKKLEHDGITATPHGPAASVAPRVTQAYTRAEDRAPDAANKYEYVPKATMMHLGWMDSYGFNQSIPKFDPWFRTVLKSHAPTVAEELVDTYMRDPCTPDRVLEHFSLFDKEWKPVPTGNHMRRAKELVASMFSPMGKVEPIDFNYAGWNEILPHLDMTSSPGLPLRREYHTQGECLGHIYDKAKRLNHFAKFLPPYAVRAPPCMIGLRPGLIRKDELDTKIKARGVWAFPAEVKVMEMRYVIPLLKRMTEQFGKIPYPVGRNMTKALPFIIDHLLNDQKTGLVTDISKLDTSVGPGYIEWAFDLIESWFVMGITPSADTRNTNVLKFLRYYFKRTPILLPSGQHLRKAGGVPSGSGFTQIVDTLVTCLITCYGLLRAGYTEEDIRGRLFVVGDDMATAVPPYFDLDEFIYYLDQLGFTVNKSKVMFSNKSIELKFLGYSKMGGGLYRPVDELLQTAMFPEKYVGNPERSRQRILGQVIASGLSNGFLAMSMHWLSLLQGGLPMDPGETYIPQKRWMRNVLGLESTPESDIVFDLFPLT

SEQ ID NO: 955 - protein, 715 aa, Fusarium mangiferae partitivirus 1
MAFNNIRNYFQERLLRIKEEWSLFQSSGEDPTTTLSTSADLDVKRLYSEHRDKISEEHAARALESEYQQLLTHFKNRLAHQHQPFQFYSSEQYSGNPEDRKPAPGIMAVPLKYHTGQVVLATEQVPETGFQLHPLIQYLIREKYPQYLPHLRKYVRPLGTTEATFKDFNREQKPSASLPKDRLDRILLHVKRNLDATPYLPVHFVDTFYDKRPLSTGTGYHNRYSYRINAHAKYSAPQEFRTRPTSKGFYTNAFAEYARDIVHNIKMTGLPFKWNSSQSDANDTTLIKELNRFLNEFPTLLFTRNHISDKDGKLKQRPVYAVDELFSTIESMLAFPLICQARKMSCCIMYGLETIRGSNIFLDQVAQWMKFSSFFTIDWSEFDQRLPRVITDTFWTQFLPSLIVISHGYQPTFEYPTYPDLDEHKMYQRMDNLLHFLHFWYNNMTFLSLDGFAYRRTSAGVPSGLFLTQYLDSYGNLFLMIDGLIEFGCTDYDIEQILLFVMGDDNSGFTYWSISRLEEFIEFFEHYSLKRWNMVLSKTKSVITTLRNKIETLGYQCNFGKPKRPIPKLVAQLCYPEHGPKDKYMSARAIGMAYASCGEDLTFYQLCRDVYYTFLPYSEDYRKTEVMEHIISHLPGQFKMLDAYAENIILDHFPTLLEIQSLVSTWQGPLDFQPKWNRSHFVNDPDVIPPSAKTMADYRQENSITVIEPLTIPPS

SEQ ID NO: 956 - protein, 539 aa, Fusarium mangiferae partitivirus 2
MEEFTSEPTNHYVLAKGSHLIDALQLKPAKLGSTTSEDILQPNFKDPNLTEIAKYGGYATYSSNSNTDPWVRETLKIKDREMYEDIYGYTRRPQGTPGMYTALKKFSGEKCSFSDLNRQQQRSMRRAIGKAFKNFKLPYKREPLDWHEVGQFLRRDTSAGSTFMGQKKGDVMKEIYHEARWLGHRMKQDGKRSFDPTKMRFPPCLAGQRGGMSTRDDPKTRLVWIYPAEMLVVEGFYAPLMYRDFMNEPNSPMLNGKSAQRLYTEWCCNLREGETLYGLDFSSFDTKVPAWLIRVAFSVLKQNVNFETFRGQKVGKRDAQKWRNVWDAMVWYFINTPILMPDGRMFRKFRGVPSGSWWTQMIDSVVNYILVEYLAHCQEVEIRNLKVLGDDSACRANDQFDLDVAQLDCEPVGMVLKPEKCEKTKDPVDFKLLGTKYREGHAYRTTDEWFKLALYPESSVLTLDVSFTRLIGLWLGGAMWDRKFCEYMEYFQSCYPCSEEGWFSKDQKRWLEVIYSGKAPRGWTTKRSLFWRSIFYTYG

SEQ ID NO: 957 - protein, 701 aa, Fusarium poae partitivirus 1
MLANIRDYFHEKLTRLLYDHKIFQSNSKDPDLTLEAHHSSDIERIYKSIHYDFNRSPAPIDYEAQYQSIKHILEDKQSQQGFPHEYYRLHESPIPDDRIPPSGIKLLPFEYKSMNVVTATPEVPESGFKIHPRIERLLRSKYPQYLQYVRKYTRPLGTTNATVSDFFKPQTPSQPVEPTRINHVMSHVMKKMAITPYLPLHFVDTQYDKRPLANGTGYHNRRSHEMNIHALFSHPKEYESKRTSKGYYVNAFLESARSLIHWIKLYGNPFRHCPSDLAQSLREFFLQRPTMLFTRNHISDRDGILKQRPVYAVDDLFLTIESMLTFPAHVIARKPECCIMYGLETIRGSNQILDKIASDYKSFFTIDWSGFDQRLPWVIVKLFFTEYIPRLLVVNHGYAPTYEYPSYPDLTTNDMVSRLTNLLTFLATWYFNMVFVTADGFSYVREHAGVPSGMLNTQFLDSFGNLFLLIDGLIEFGSTDAEIDDILLFIMGDDNSAFTTWSITHLEQFVSFFETYALSRYGMVLSKTKSIITTLRHKIETLSYQCNFGHPRRPIGKLVAQLCFPERGPRPKYMSARAVGMAWASCGQDKTFHDFCRDVYHEFNDDRADLDESAYLHIQSHLPGYLKIDESVRQIVDFQVFPSQQTVYHTVSRWKGPLSYQPKWDLAHFVNQPDVVPPDSVTLHEVWSELNFTPPILHNLF

SEQ ID NO: 958 - protein, 755 aa, Fusarium poae partitivirus 2
MHSLFTIVNLLLLARFQLRRKRKETTKTLIYPIRNILFEWELRRSTPREPGIPLRYFDYSKSLLSYIDLQTCHKINIHLDDHTDALMERYASRDEPFAVYQHISDEDLPPERTPAPGIRHAQCRYHEIPSGTLNLDEKQHVLTDDPDFIETPEFRSGILYDETIDLSGSPPIPEIAQIIHDWFPHFEPFLAEYCRPPSFGPQAFRDFNRPTPHPPPPPHERHEAIMDIVRAKFNLKPYRPMHYVDALAAETPLNTSASYYSKFNPTSRVFARYSAPSRYKDKPTSKGYNFNVVMNEFRTEYHHIKYDGVPFPADLHDPEANASILNTWFAKHPSQLFIRTQISKRDPNDPKKIRPVYSVDDRFLHIEKTLVVPALAQLRNPQCCVAHGLETFRGSMSLLDRTALVYTSYISLDWSQFDQRLPYYVIIAFFLDFLPSLLIISHGYFPSRGYESTPQDIHAFASKIFNVVLFLTTWYLNMTFVSFDGFAYIREHGGVPSGLLNTQFLDSFGNMYIIVDCLLEFGFTPAECLDMLYCVLGDDNLIFARQNFDRICDFMIFLTKYADTRHGMVVSILKSVYTKLRSKISFLSYENTYGMPTRPIGKLVAQLSMPERPIPDNRKWIHAARALGLAYANCGQDAHFHLLCHMVYEKFRPDTPVPSLHIEKVFKKWKYQLPEFDIESVTYTFPDFPTLFSIRQLVSDYHGFFSETDKWNTDMFEAPPSDNLHDYVTLKEYMNSNVHMSHTVNEFMHGKRSFL

SEQ ID NO: 959 - protein, 579 aa, Fusarium poae partitivirus 3
MCLQQPTCRIHLGKQSINRRTKRFLMKQSRTSEREIRFIEKLTKKAIYTHCSPALADEAINHYRRSATDTEAGENDFLKTDLPYHDVPRDFHYKRALKVVEKMFRPHRRLKPIAFPDLRYYPWTLSTSAEAPYTESTYWQNRIAQKQSEGDIDNARLSFHNLYNEIFHINRQLVHDIKYGRTPFWTTNGEPVPYEFTYLHSRSHMVKSDKPDKIRAVFGVPKLLLMVENMFIWNLQREYLNSSLGSSPLLWGFETIRGGWMKLLNKLTGKSFNTVLSADWSGFDHKALHEVIDDVHDIWRSWFDFDQGYEPTISNTHDYSDTKSREEQIDRLWTWMCHAIKHTPIKAESGNMYLWQWNGIASGFQQTQLLDSFVNAIYLLTCLSSAGINIESEHFTALFQGDDSITTFPEIIPDYKAFIATLTFEAKRRFNADLSPDKTTIGPSPDDVEVLSYGNTSGIASRSPAELLAHLLYPERPRRAPEAAAAAAGIAQAAMGCSSQVFNTCQDVYNFLVNQIGVKPEWKEWSPNKITPYSMNVQKFPTFTETFLQNFDKRERDAHDRNLLWPSKPTGNGFHFLND

SEQ ID NO: 960 - protein, 608 aa, Fusarium solani partitivirus 2
MTNLNFLRTLETSFFGSHVREKFAEFQDFRLDWLVNRALRFFAKEEVDQALSNRRSEHSEEALINDFMSFEQPYHPIPKDDNYYRAVARTTELFQPDKPLHPVSYPDLRYYPWKLKPNAEAPWNIPDFTFTPTFRDLDDESETPKLEENLSRLSNWMSDRVVSVRQYLNAKYNIRMIDNQFPKFHNLYNEIFQYNRTLVHQIKEGHPAFWKHGTPKPYFWTTLHARSHVVGKDEPDKIRAVFGVTKLLLMIENMFIWPMQALYLNNPSKGRLLWGREMIRGGWRKLFNEIHENGKPNTFLSLDWSQFDKRLLFELIDDVHKIWRTYFDFSRYQPTSFYPNANPRDVQRLERLWQWMCYSVKHTPIRLPNNELWSWNYNGFSSGFQQTQLMDSFANMIMILTSLASLGINIESDNFWIRVQGDDSLIALYEQIWLSYGPNFLTMLGDASAFYFNAKLSVKKSQISDHLNGMSVLSFFNDFGLPYRTEEDLLRHLFFPERNQDLARTASAAMGLAYAASGCSPRFHSLCEYIWNKLVLEKGFSPSEESIQWLERAGVFTELDIKAMLSEDFPTAKMLRANVWSHTPRSVQERERLWPTKPGTRARFFFLT

SEQ ID NO: 961 - protein, 578 aa, Gaeumannomyces tritici partitivirus 1
MENLLSLLSQLSLAATNLEFVRHDPMHGRIPPFLKTHNDYFFIGQALVLSAIATYAMLLAPGAYNRIRNHHRSFAGEQQAEAFFMRYNVEPHSIVKDRFYWQAMSIVSDWFRPKNLIHPVHFTDLRWYPWNLSANAERPFSVNNNLKTELIKLKVQGLIDNARMSFHNLYNHVFIYCRSYIHRVKNGSWPNLHPMTLHVKPALVSEGSIDKVRTVFGVPKPIIFMEAMFFWPLFSTYFTEQKSPLLWNYETLQGGWNRLNSEWYERYQAFKPIFNLDWSEFDMRVYFSMWKDILDSVKTYFCFCGRYHPTNLYPSACTSPSRLHNVWDFLQHAYFNMMAVTTLGNEYKRNFAGMPSGIFCTQFFDSFYNAVMVVTILLALGEPVSKDHFLKVMGDDVLLGLLRNIPLHDWAPFLERFAHEAKTRFNAKLNYEKSGYAATIQGASVLSYSNWNGYPRRDPEQLLAQLLHPKSLRDTPPRLMSRAIGIYYASAGDPRLRPICEHIYNELKHQGFSPNAYTFNKMFDPRSIGMDTIDLSSFPSKTEVISRLLGPSARSPVLQAIYWPMDHFLLAPGSILHE

SEQ ID NO: 962 - protein, 617 aa, Gaeumannomyces tritici partitivirus 2
MEYLVHAFNRLTTWFTAPRNLEYVGKYSYEPKSGYVNPVALSNHQTTVLHAMNKYLYEHEIKLITQEYRRSEINLESILEDFFANDVEDHAIPFDEHVEYGLQCMLDAFRPPRPCRPVHLLDVQHHYPYKWQVNAEAPFSTDKFFLEHRQTFGDFIQLRGYEHIDQADFRRRYGDHIDNPTLHTALVPPKFGFMKQMIFDLTRRWHHIIKSGFTDLANMANSPYLKNRFVFPMLLHTKTAIVKRDDANKMRTIWGCSKPWIIADTMLYWEYIAWVKLNPGVTPMLWGYETFTGGWFRLNSLLFTAFLRKSFLTLDWSRFDKRAYFSLIHRIMQGVRSFLDFSSGYVPTVDYPSYDQWSHNHAIKLERLFLWTLENLFQAPIVLPNGDMYRRRFAGIPSGLYITQLLDSWYNYTMLATLLSALGFDPKACIIKVQGDDSIIRLHCLIPPDQHDAFMSRLVELALIYFNSIISVDKSEMRNSLNGCEVLSYRNHNGLPHRDEIKMLAQFYHTRARDPTPEITMAQAIGFAYASCANHKRVLWVLKDIYDYYNSLGFSPNRAGLSAIFGNSPDLALFPFELDHFPTAREIRQFFTSTSYINETQNAKTWPTNWFLSSPGE

SEQ ID NO: 963 - protein, 709 aa, Gaeumannomyces tritici partitivirus 3
MVLNTVRDYLHELRTTKILEWKLFQKFGKVTPDPESDTPDLDLRRLQAGYRSPDESTLTQEYKNIRTDTRLGFEVSDYYKGENYEFYQDSDPATFPDNRSPVPGIIQLPAKFHKEQVVTATDTVPESGFQLHPLLKYLVYRKYPQYIEHVEKYTRPLGTTDATFADFNKEQKPYPPVPTDLVHRIVPIVCTLLNAKRFLPLHYVDTFFTGMPLHTGASYFYRHSYEIRTHAAFAHSKDYSARTTSKGYFLNSFTEWARIVVHRIKQFGYPFDPTNLTEPEIRSHLMKFFMEHATMLFTRNHISDRDGILKQRPVYAMDTLFLHLEAMLTFPLHIMARSMSSSIMYSLETIRGGCSKMDNIAQHFKSYLCIDWSSFDQRMPWIIVDTFFTVFLPSLLVISAGYQPTHEYPTYPDLTTDTLFTRMFNLLCFLRLWYFNAVFTTADGFAYVRTLAGIASGMLNTQYLDSYCNLFLIIHALLHFGATEDMIFSFCIFVMGDDNVVLTRWNITELNSFLQFFEAHALERFGMVLSRQKSIITTMRTKIEMLGYQINAGRPKRPLGKLVAQLCYPEHGPIDKYMSSRAVGMAWASAGMDRNFYLFCQDVYHTFLPYAETPDKAAILQIQKHLPGMFKMLDSIDEFVNPERFPALDEIQARFRSWQGELSSDKKWSPAHFVYAPDVVPLSSVTMADYMSQHDIKFPEVTQYFASTP

SEQ ID NO: 964 - protein, 555 aa, Glehnia littoralis associated mycopartitivirus
PIKDLSVKKITFFTCGLFYYFIRVWRFKTKHKKFDLRFYNQLRNVFFEYNDRLTSKPTDPPFVYSKSTLTIIDKVIATRFAQHHDDIIDGIRSHRITVSHGPLGLYDLIDPSEIPELRLPKPGILVLPIRYHEKSAGIGYTSVGERLLTNDPGAAEEPLDRKAETYVVDIDLSGFPPNPEIAEIIYKWFPQYLIHLDYYCRPFSFGPQAFYDFNRTTERKPAPDPSRETEILKIVEQLFNIKPYRPIHFAETLASGIPLNTSAPFAEKHDPESIALARWNSPSPYAERPHSKGHFINSILTFGRRILHNIKETGTPNADQLSDALIIDSPEHARLQNFFIRNPTELFIRTQISKRDPSEPKKIRPVYSVCLLFILFEIMLTYPLLAQLRNPECCVLHGLETFRGSMHVIDACAMHFTSYVSLDWSQFDQRLPIYVIICYYTRFLPRRIAINKGYTPSHSYPDTRFDNPDIFAIKIFNLLQFILLWYLNMVFISFDGYAYVRLNGGVPSGLLNTQSIDSFGNAYIIVDCMLEFGFTKSEILNMLFFIMGDDNIFFA

SEQ ID NO: 965 - protein, 701 aa, Grapevine associated partitivirus-1
MLPKIRDYFHEKLKRLLFDHKIFSSQHEDPEQTAARHASSDIERIYKSIHNYAPHPDVIHDYEAQYQHIHDTLVTKQSLSGFNAEFYRLRTDPVPDNRIPPSGITLLPFEYKSMNTVTATLEVPESGFHIHPKIERLVRSRYPQYLTFVRKYTRPLGTTDATVADFFKPQTPSAPVEPERISHIMTHVMKKMAITPYRPLHFVDTQYDKRPLHTGTGYFNRRSIVQNVHAMFSYPKEYESKPSSKGYYINAFLESARSLVHWIKSTGTPFRHAPSNLADSLRTFFLQRPTMLFTRNHISDRDGNLKQRPVYAVDDLFLTIESMLTFPAHVIARKLECCIMYGFETIRGSNAALDTIAQSYKSFFTIDWSGFDQRLPWVIAVLFFTEFIPRLLVINHGYAPTYEYPSYPDLTTTDMVSRLNNLLTFLSTWYFNMVYVTADGYSYTRHLAGVPSGMLNTQFLGSFGNLVLITDGLIEYGFTDHEIDNLLLFIMGDDNSGFTHWSIARLESFIQWFETYTLHRYGMVLSKTKSVITVLRQRIETLGYQCNFGHPRRPIGKLVAQLCYPERGPRPKYMSARAVGMAWASCAQDKTFHDFCRDVYYEFLDEREEIDETTYGMLQSYLPGYLRIDESVRQTINFNEFPSLEHVFSTVRKWKGPLSYQPKWDLAHFVYQPDVIPPNSQTLHEYWQLHNYKMPILYNLF

SEQ ID NO: 966 - protein, 326 aa, Grapevine associated Partitivirus-2
VYFLLHFRKQYMNKNVIYDDPVDAVEPFLGDNKETFLLWDASSSSRSRVTANTDFIEQPGLKEIARYGGYSTYSAPGNTDPWVRLALKIHDRERYDRIYGFTRRPAGLEGMYKALFRFGEQVNEFKSLSFDQRNCMRSAIKSARSAFRLPVKHEPLEWEEVGQYMRHDTSAGVTFPGKKKGEVAAQIYTEARWLGHRMKQGGKERFDPRKVRFPPCLAAQRGHLSPRDDPKTRLTWIYPAEMLVIEGLWAPVMYHQFMSLPNGPMLCGKSSQRLYTEWIVNYREGEKLHGLDFSAFDSSVPQWLIRTAFDILHQNVDWLNWRGKPT

SEQ ID NO: 967 - protein, 423 aa, Grapevine cryptic virus
SFFSRPRRWHHIIKSGFTDSTGLEHTTYYKQRFIFPMLLHSKTAIVKRNDPDKMRTIWGCSKVWIIADTMIWWELIAWMKLNRGSSPMLWGYETFTGGWFRLNATLFSQYTQRSYVTIDWSRFDKRAYHWLMRRILLKNRDYLDFSQGYLPNTSYPRSEGWNSNKSTALDRLYDWSQENLFNAPIVLPDGRMYTRNYAGLPSGLYTTQLLDSWYNYTLLAIVLTYLGYNLEKSIIKVQGDDSIIRLAMLIPPLEHEDFLLRMQSTADTLLHAKLSLDKSEIRNQLNGCEVLSYRNHHGLPYRDELSMLAQFYHTKAKDPTPEITMAQAIGFAYAACGHHRRIHEMLKSIYEYYRKQGFSPNPAGLTIVFGDSPDRPSLPFTADRFPTLAETRAYLMDTDYRNAEQDAKTWPLTYFLYPPCSRP

SEQ ID NO: 968 - protein, 713 aa, Grapevine partitivirus
MSIHKLRSYLQERKERIKFEWQRFQTSRDASSPPPSLTDSDIRRHFENQRDRQQEFDSHLVLEHEFNAIKHTMQLQNDTAREPFEFTSTQSFERFPDNRSPASGIIGVPKRFHSGQQVNPTESLPETGFQVHHLLRYLLRNKYPTYEYYVDKYVRPLGTTDATFIDFNRQQVETAPISDFRKDRVLTHMMKRLNATPFLPLHFVDTQFAKLPLHTGTGYFNRHSFRSRAHAKYSHPPEYAQKQTSKGYFYNAFYETARTAIHRIKESGLPFTFEFRDDKTDDENFENLASALNAFFDNHATMLFTRNHISERDGILKQRPVYAVDDLFLLIEVMLTFPLLVMARKPESCIMYGLETIRGAMHYIDRLARNYDSYFTIDWSQYDQRIPRSITDIYYTDFLERLIVISHGYQPTYEYPSYPDLTAQSMFNKMNNLLHFLHVWYNNMTYVTADGYGYRRTTAGVPSGLFNTQYLDSFGNLFLIIDGFIEYGYSDDQIDDILLFIMGDDNSGFTHIPLFDLEKFLTWFEKYALNRYNMVLSKTKSVITDIRGKIEMLGYQANYGQPLRPIGKLIAQLCYPERGPKDKYMSYRAIGIVYASAGQDVEFYKFCKDVYHLFLPFAAPPEDIKLSHFQSYFPGYLRALDTPDEFFQIDHFPTIWEIRHVYSRYAGPLDYAPKWNYAHFMHDPNVIPPSAMTMAEYRELHKIPRLQTPSFMH

SEQ ID NO: 969 - protein, 274 aa, Grapevine-associated partitivirus 1
MEELLYVPPSIDNVVEESLSLDDSTLTPSNRTRGTSYDVIPPNFQAPCLREIARYGGYGVYSGQSNTDAWVRTSLKEFDREVYDQIYGFTRKPEGVPGMYKSLLKFADDKNQFHSLNRVQRRSMIKAIGEAKKAFKLPWKREPLDWHEVGQFMRRDTAAGVTWMGRKKGDVMEDIYHKARWLGHRMKQDGRGSVDPRAIRFPPCLAGQRGGMSEASDPKTRLVWVYPSEMLVVEGQYAPRMYHDFMANPETPMLNGKSAQKLYTEWCVGLREGE

SEQ ID NO: 970 - protein, 298 aa, Grapevine-associated partitivirus 2
MNLIKLAYNIGNKIISYAPQNAFEEFNAFRLDWLINRTLKFYSQEEVDKVLLNRRSSSTSDAVIEDFKTFEQPQHIIPKDDNYVRAVHCTRLMFKPKHTLFPVSFPDLRYYPWNLKPSIEAPWNLDTFSFTPTFRNLDEESETPKIREDLALLMQKVTRTIKWLWHGRIRVSDYLRMKQAIGIIDNNRRTFHNLYNEIFQYNRTLVHQIKEGSTRFFEANGTPIPYYWNTLHARAHVVSKDEPDKIRAVFGATKLLLMVENMFIWALQSIYLNTESGNLLWGREIMKGGWLKLFNETS

SEQ ID NO: 971 - protein, 747 aa, Great lobelia partitivirus
MPFNAVRNYLAERLIRVKREWSIFQSSDRDPYAAREHYHDSDLRRYYDNTRYNPSNELKTLALNKEYSTLVQAYLNTNELKHQPYELHQPLPVDIAPTPASRIPAPGIKLVPLMYHYGHVIHAQPRTQRLNDSSIISINDEHSGDEGYPLDPRLYNLITSRYPQYLPIINRYCRPLGTTEATFADFNKAQKPSVPIDDDRKDHVLRLIHHFLNIKKYRPVHFVDTQYCKTPLVTGTGYHNRHSFKQRAHASYSRPDQYAQRPTSKGYYYNATYENARTLIHYIKKNGLPSSHDFTQSSSDLSDDDIQLYIDVANNFFNDYPTLLFTRNHISKRTENLKVRPVYAVDDIFIIIELMLTFPLTIQARSPSCCIMYGLETIRGSNHYIDQLARSYSTFFSLDWSSYDQHLPRVITDIYYTDFLRSLIVINEGYQPTYEYPAYPDLNEHKLYTRMDNLLHFLHTWYNNMTFLLPDGFAYRRTFCGVPSGLYNTQFLDSFGNLFLIIDAMIEFGFSDDEISNFVLLVLGDDNTGMTRIHISVIDKFIKFLEAYALNRYNMVLSASKSVLTTLRSKIETLGYQCNYGHPKRDINKLVAQLCFPETGLKPHTMSSRAIGIAYASAAQDMIFHSFCQDVYNIFRDDYKPDLRANLYYQRQFFQDLEDGIPDLATPVVPPFPSFFEIRSAYSEYKGPLTFEPKWNKAHFIDDPDVTTIQSKSMLDYELEHKIPRRIAPTFETVVPSTLNFADATPS

SEQ ID NO: 972 - protein, 715 aa, Grifola frondosa partitivirus 1
MANRTVRDFLAERKLRIVEEWKRFQQSLTSTEEQAPIDDSSDIRRMYQSFRDSLSEQQKTAVLDREFQSLIDSMLLKNNEKKEPFEFSSDGQFIGFPENRRPQPGIAGIERKFHTGQIVSTSDEVPEPGYPLNPIIRDLITMRYPLYLKFVDKYVRPLGTTDATFRDFNREQRPSAPIDPDRKERVLKHVFKRLNATPYLPIHFVDTQFTKLPLHTGTGYFQRHSFWIQSHAKYSRPDEYRDRPTSKGYVINAFLLLARTHIHKIKETGLPFDFNLDDIDTDDDKFNTLIRYLNKFINDHATMLFTRNHISDKDGILKQRPVYAVDDSFILIEAMLTFPLLVMARDSTCCIMYGLETIRGGMCYIDRIARSYNSYFSIDWSQYDQRLPRCITDIYYTDFLESLIVINHGYQPAYEYPTYPDLTEDDMFNKMNNLLQFLHLWYNNMTFVTADGYDYRRTCAGVPSGLYNTQYLDSFGNIFLMIDGLIEYGCTDEEIDMILLFVMGDDNSGMTGWLLSKLEAFIIFFEDYSLLRYNMVLSKTKSVITAIRGKIEMLSYQCNYGRPLRPIGKLVAQLCYPERGLFYKFMSYRAIGVAYAAAGIDPTFHKFCQDIYTIFLPFAAEQSTFNFNRASSHLPGYLKAFDEITTIIDFTKFPTIFEVRRVYDHYHGPLTYAPKWNFAHFINAPNVIPPSAKTMSQYRKEHKIPRSEVPSLPIG

SEQ ID NO: 973 - protein, 599 aa, Grosmannia clavigera partitivirus 1
MLNLKVIGKYPALGKPIHGHGDTESSIRKVTADIIDHALRKFLSPEEADQVINGYRRSEWNENALNKDLEKLNSREHIVIKDEHYWNAINHVKSLLTPEKPLQPVHFADLRHYKWNLSTSIGAPFATSEKWTSYVKAKYNFAKRGIPFESRAHRDLFTEAHQTSEPLEIRDARMTKHNLYSEAFTITRKNIHLIKEGRTHNEKGHDLRYWNTAFARRHLVSNDEEDKVRLVFGAPFTLLCAELMFIWPLQVFLLTMTGPHAFMLWGFETILGGWYRLRNFFARYAPHAEAVVTIDWSGFDRYARHSVIRDVHSQIIRPMFDFTHGYHPTKHYQHHEETPGEKPYSERLENLWNWMTDSVLSIPLMLPDGTLCRFQHSGIFSGYFQTQILDSLYNLVMLFTILSRMGFDLKKVVIKVQGDDSIFKLFCCFILIVNSFMTLFKHYAQIYFGAVVNDKKSDIRNTLEHAEVLKYRNAGGIPSRDRIPLLAQLRHPERSSAPENVAARAVGIAYAACGQDPLVYMICEDIYTFLTTKMEVTPRQRELDTMFKYIDSSFEDLPHTFSAAKFPTFNETLQHLMDGPKPLSRAHWPEIFNGLPGRN

SEQ ID NO: 974 - protein, 571 aa, Guiyang partiti-like virus 1
MAERAETSRVIVKLPRRGPGYAFDLTPSRVDPLALRAVQHVFGAEVVGSAFSRMHRSTLSYDALMSDFKQYERLYAPSAPIRSSHIYQMTIQSVRDDLSRREKLIPLTTGAVVGLSDFPKAKSPGLPWKHLGYNTKGDVVANPENVAEMRRFWQHIGAGIPRDFPDTCLFARTQVCDVSKQKIRSVWGYPLHVYMEEARFFYPLMDWLKTGTDHKLPIAYGYEMAHGGMVAISELLVRSGEGSLAVMTDWSSFDKSIPPWLIRDVFDLLSEVFSFDQVRDVEGKVWHVRPDRTWRRWKKMVDYFIETPVRTCKGERFLVRGGVPSGSCFTNIVDTIINTIVTRFLCYQTLGFYPSGEMYLGDDGVVALPPGSMVDLDLMAEIAALKFGMTLNRNKSYVTSNIENIHFLGYYNHPIGRPHRDQDLLIVSFAHPERTRRTAEECAAAALGQLWANFDPYLAYRWYEVLMYCCDEFCLDTDVVLAHLRGHAHRHKYLSHVGRNVAALTVPTPNEEHLVLAVLASTIPKRVPARREYSYSELWDRTVRVCFERVTPPHDNRREEPPDETHQIDPG

SEQ ID NO: 975 - protein, 725 aa, Guiyang partitivirus 1
MRENENPQANGPFKDPTIYYKEIADIARLEVQRCLHSKKANYAVQNFLIFNLNFNYSSCYIKLSDYDKKKIKTQILDTEREIYKVDSQKRENFEFYRTLNFDEVPENRYPAQGITLLPFKYHTGRVVKATDKIPETGYFIKGSILRLITRSYPTYLPIVESLCRPLGTTDATFNDFNKNQEPTDVLNQKLKDHILHRHIYPILNFKKYKPIHPHDFQFCALPLNTGTGYYNRYSIEARATAKLHHPAVYDNQTTCKGYFVNINEYFHRQIIENIQKYGCIEPIHNPNKEVYERVKNMKNKQFFLSHPTLMFTRNHVSPSDREGELKQRPVYCVDDLFLRIEAALAFPLLIQARDELSAIMQGLETMRGANCYLDTISQTYKTYFTIDYKSFDQTIPLKLVTLLFSDVIPDLAIVNLGYTKKWGDLDNKEHQDIAQGFQNLLKFMEQWMTEMTFVTGDGFAYKREHAGIPSGMLFTQVNDSIVNLFMIIDSLIAYGCTDDEIDQMKFFIMGDDNCIFSQWPMQKIERFSLFLPEYLHSRWKTYTHPDKNILTSDRRKISTLSYECNQGYPVRPIEKMVAQLVYPERGFDEKLMSYRAIGAAYASSGCNKQFYEFCKDIYNMYLPDRAPINEFNIRKIKKMMYHGYYDDESFITDEMLEEFPTFGRILFMHRAYLGPLHPGPKWKFDVFREMPYCNDKRGITLTLRNEAMKFLSPPLSPRFNFKVND

SEQ ID NO: 976 - protein, 596 aa, Gyromitra esculenta partitivirus 1
MQNIQELAPDFENAVPIRGNDPSKPNPLSTITNRIIDTALHKFLTHEEATKVITGYRRSPWNEDALKHDISKLNSAEHPVVKDEHYWNAINHVFKLIKPDVPLKPVHFADLRQYPWRLSTNVGAPFNSSKHWQNYVKAKYEYFQKGTPFDNIAHRDLFTEAHKTSQPLEILDTRMTKHNLYTEIFYITREHIHIIKNGGTTSRKGQDLRFWNTAFARQHLVKQDDDDKVRLVFGAPFCLLTAELMFIWTLQVHLLLMQGSKSFMLWNFETILGGWYRLRNFFATYALRHQLVATLDWRGFDKDARHTVIKDIHSCILRPCYDFDHGYHPTKDYPDTTYDEDGTHTGPRIQNLWNWMTDTILSIPLLLPDGTKYVFTHSGIFSGYFQTQILDSLYNMVMIFTILSRMGFDLDKVVIKVQGDDSIFMLLCCFIMICTSFLTLFQHYATYYFGATLSTEKSEVRDSLQHAEVLKYRNNNGIPYRDELSLLAQLRHPERSTDPDAVAARCIGIAYASCGQLPRTYQICEDIFTYLTRKYDATPRQSELNFMFRHLEHIDIKLDASKFPSFYETTRHLVDGPRPLANSHWPKDHFNGLPGR

SEQ ID NO: 977 - protein, 563 aa, Hameenlinna partiti-like virus
MRNDYELDSNPGSCDAPIPIIRKYDENHPYEFEWRAPPQVEGLTLGPAMRQLEKRAPFPASYFPPHISVNACYVFDQCGMKAERVELLSKYQRSWVTQDSLRKSTLGYSHVKYAPAFNDSRLDEAIEFVRDEFVHALKEPLKSWTIEKVMKEGDMPKNTSPGLPYIQQGYRSKADVWKDHHQDIEEEHIRIREGYRPRTPDCAAFARSIVCEKPKNKVRLVWAYPLEQVLLEAKYVQPLLQAMTSQKIGQTVAYGAETMRGGMEWLNTELHSLPRQNYICIDFSSFDQTVPAWLIRIAFDILEECFTTTEVEDVNGRIVKTNDRAVAREWRQIKHYFINTPLRMEDGTRYEKTGGVPSGSCFTNIVDSIVNMIVMRYVLMSTAGEWPNFLTVLGDDSVTATTGLVNLNDMAQVAKDKFGMIINVEKSYWTQYIGNVQFLGYYNHHGYPARDEDTLLAGLLLPDSSVDESLALTAARFLGISQASCGASRACIKLTKYLFRELERRGKNFVVDAQKLYHIQKAGGWLPAAGEKPEPLPAVPFLEYAVLPKHSCEKLKQGIRLAR

SEQ ID NO: 978 - protein, 522 aa, Hangzhou partiti-like virus 1
MSSDTFDDDYFGKDNPSVWDYPFRYITETTRISDFRRGILRQTQRYDPFVDVALKHFDPELRESIKGYTRSPGDVWDVAEKLRKYDCATIPHVTSDHRFTSAYNQAVRDVMSDFKLDAPVVPHWIKDVDLVKSTSSGYPHFERKGDILETILQEGRFHFHHLKLYDLKRCPLLPCTVSTRGGLSESTDPKTRLVWMYPAAMTACEAVFAQPLIDKIYSEKAHLLLTGVDSKYRIQKYLSLISDDADRCGVGMDFKSFDTLRSNRLIRDAFAVLKQNIKFGYYYDKISGLQKGRSGVDVRAEKAFDNIVEYFIHTPLLLPNGRMVTKHHGVPSGSHFTNLIDSIIVRILIKTFAYYEDFRIYELRTNGDDSAFTVYSDSAVGILEKAAVFFDKFFKMTVSVAKSCVATAPSAMHVSGTVWKGLRPSRPTTEWFMLAAYSDTYIDKPFDSFQRLLGLGIAGGFGDATFTRFFQYFQTGYDCRQGPRILNWNKLRWLEHAFNITDLPLLYKQGSRTHVRLRLLAA

SEQ ID NO: 979 - protein, 446 aa, Hangzhou partitivirus 1
MAWKAAACLFPPTPYKRYRPRPSDFHSAFERYLEPSPKRPTDDLYTTAVQKVSEWLNLPKIKPLHLNDSMARFPHPEKSPGLPYTREGIRKKADVPPSRVRSFVHQLKYGLITNIRTPCTAAARTTVATVDKFRLIWVYPCNVTMAEGMFAQPLIEAFLSWRTPYALWVQYGKGHMKWLASQRRSRRQKWISLDWSNFDANVPAWLIRDAFGILYAKFDLSAYEGWGRPTDDHTLPRLWKRLVHYFINTPMKFPGGEVRVKAKGVPSGSYFTNIIDTVCNAIACLYILMKMGLQSHQVTPWFLGDDALMLVPGLVDLQAFAQYATDVFGFKLNAAKSSVGDTFSFLGYGSTPSGVPIADYNKLLAQLLLPDAPDRSLDDFVIRARALQLSCFGVGCPEFVKLVDDTLQDFPAGSGTLHPRDELVYKMHQLGLSDWPPLTLVWCLVG

SEQ ID NO: 980 - protein, 566 aa, Hattula partiti-like virus
MMNLQDGRLGSCDSPSPITRTYDRDHPYHFAWRDPPSVSPEELIVGPSLRRMSKRSPFPACYLPPRVSVNACYIFDKCGMAQERIELLSKYHRSWITKDTLRSATLGYGSVKYATKFEDEILRESVLSVRDEFRDKLAAPLKSWTVEKVIEQGALPKMTSPGLPYIQRGYRTKKDVWDECKTEIINKHQAVRKGQHVTFPDCAAMSRSAVSTSDKNKTRLVWSYPLDIVLLESKYVQPLLLAMIEQKIGTSVAYGAETQRGGMKWLNHQLNKLPDMSYLCLDFSAFDQTIPAWLIRIAFDILEECFDIHTVEEVNGERKTDAITISREWKAIRDYFINTPIRMEDGTRFKKTGGVPSGSCFTNLVDSIVNLIVVRYCIKATTNFWPSFLCVLGDDSVTATLGNVNLHNIAECAKDCFGMIVNVEKSYWTSSPQNVQFLGYYNYHGYPMRDEEPMLAGLLLPDSNVDESLGLTAARFLGIAQAMCGSSAKIVYLCNRLFLELKVKGLDMANDAKKLYHIRKMHGWLPAAGEDGSVPPTLCCTIKQHDSMEKSSTISAVLRAYHPLWE

SEQ ID NO: 981 - protein, 608 aa, Hebeloma mesophaeum partitivirus 2
MTNLTYINTIRRETLPTVNPWNTPDEHLRQRNEWLTRQFKKFYSDEEVEQVLTNRRSDFSDEALIADFKAAEQPRHVIPEDTFFRKAIEVVTEQFRPNRMLHPVHFPDLRYYPWNTSVSAEAPWTNKDFKFVPMDRSIDEESEAPKFAEKTARKLRKWKNPTDVDTYLQWKQKIGLTLDASRSFHNLYDEIFIYNRPLIHKIKEGEAPFWTTDGKPLPYLWNTLHARSHVVGQDEPDKIRAVFGATKLLLQAELPFIWPLQATYLNTRAGRLLWGREMSRGGWKKLLRELFSHGPPSTFLGVDWSQFDKRLLHQLIRIVHNIWRSYFDFTKYEPTSQYPNAKPGDPKRIERLWEWMCAAITNTPILLPNGQLWTWNWNGFGSGYQQTQLMDTFPNAIMLYTCLLALGVNVDSDTFWARFQGDDSIVGFMERMFTLFGNNFLDMLAETALHYFNAKLNIKKSQIQDRVSGMTVLSYSNRMGLALRTEQDLLRHLFFPERPQDYGRLAAAAIGLAQASLGSSERFHALCNLIYEKIVIERETQPKWKVLRWLQRTGQEEILESLQHAGFPRLTDLQAQRYATVERTEKENERQWPTYATPNRLFYFLMPI

SEQ ID NO: 982 - protein, 609 aa, Hebeloma mesophaeum partitivirus 3
MNNLTFLRRIGAMEMPYRNEWEQSATSMAFRNEWLERQMRKFFTDEEVNQVLTNRRSDYSDTGLINDFKATNQPYHEIPDDVYFRSAIDAVTEQFRPNRVLYPIQYPDLRYYPWTLNVSAEAPWNAPGFLFTPMDRSVDHESLQPKLIFDIKQRNKLHKWNRPTSVKTYLSWKQSVGLTENDHISFHNLYDEIFIYNRPLIHQIKEGEGRFWKDGKPVPYYWNTLHVRSHVVAQDEPDKLRGVFGATKLVLQTEQPFIWPLQASYLNTDAGRLLWGREMSKGGWRTLFSEIYEHGPPQTVCGLDWSQFDKRLLHQLIRIVHGIWRQYFDFTRYEPTKDYPNANPRDPRRVERLWKWMCNAITDTPILLPNGELWKWNWNGFGSGYQQTQLMDTFANAIMIYTCLLVLGIDVRSKQFWARFQGDDSITTFFEQMFRIYGNDFLIMFSAVALKYFNAKLNVKKSFILGHVHQATVLSYPNWHGTPYRTEEDLLRHLMFPERPQDLGRLAASAIGLAQAALGSSERFHNLCEHIFNKLVKQKGIKVKWTALKWMVRAGYYGTIDQLKRTEFPKIEELLSLGIDRSSRSENDRQRIWPTSPNAKGGFFFLNTI

SEQ ID NO: 983 - protein, 553 aa, Hebron partiti-like virus
FFPRITPALMALSSYTIVERQGQYRVEDVVYPGQPPFLSVHVGIPRNLKHLRMSKGFPLRMEPPHVDFKVVRAMFQAGCGNVARHILKTKSRSWITPERVFDNVLNFAYPTKPRTNLPQYQQALAELVSEFNMEDKLTAIGYKEASEVIPQMTSPGLPYIHTHPGMKKGQVLETEFDSITHFWDAVGNGDRELPLPDCAAFARSHIGDATKNKVRPVWAYPLTAIVGESVYATPIIEALKNQTILRSSAYGMEMMKGGMEWLNNQVNRARRKSPGCKFLLTDYTSFDSSVPAWVIRDCFAIIREKFDFGDDRKHHLNVLRKLESYFINTPIRNADGRRILKNHGIPSGSMFTNILGTMVNFLISRTICNLKLCDLPIFDVYFGDDGLICVPDAANINLTELAEAAESIFGMQINVKKSYWTANVKNIHFLGYFNYHGSPYKPKEELFASMLYPQTFKKEWSFTMSRGLGCLMAAAGCCRDIYNTVCWIYRGAMNQDGMLDAALNHLRTNPRAVRHLRQMGIEPIDVNYRLLYSLNYTAPLSDCSKLEKYVNLV

SEQ ID NO: 984 - protein, 571 aa, Helianthus annuus leaf-associated partitivirus 1
MSNLEYLGTDHHWPQIPRFAKQPNDWYFDCQNVVRKAVCLYSCVLGPDSTNNVVNGFYRSHADEASAEKFFLKYDVEPFDIVKDDIYYRALQTTTDWFKPTHPIHPVHFCDLLKYPWKLSTSAERPFTHNNELKLLIQQLKQEGILDNARMSFHNCYFKVFSECRTHIHNVKDGLNVPLYHIDLHVKPALVRVNEPPKVRTVFGVPKSLIFSEAMFFWPLFSNYFTNAQTPLLWNYETLSGGWYRLNYEYCTRWRSYNTIFNLDWSEFDMRVYFDMWDDCRAAVKSYFCFCGQYCPTREHPHASTQPFRLENLWNWTGMAYKQTPCTTTTGNVYRRRFAGIPSGIFCTQFWGSFYNTVMVISVLDSLGIRITKDSFFKVLGDDVLFGILKLLPISQWADFLQAFSDEAKRRFNANLNPSKCGVSIGIHGAQVLSYSNWNGFPKRDAEQLLAQLLHPKSLRDTYPRLMARAIGIYYASCGDPKVRCVCEHIYSELKYAGFEPSASGLSGLFDPNAGIGKIDLSHFPSKTEVVARLLKVSRRNPDLQAVYWDSEHFLEEAGRSTTCSVLPTWV

SEQ ID NO: 985 - protein, 477 aa, Helianthus annuus leaf-associated partitivirus 2
MNLNALRNYEYVDFWTDLEELPGTHVYSIRREPEQTYYDEYAKHKLINYHQELYNQYIEGWSRSYYSHARHLEALLNYATADIPVTKLDCIRYGACINAVRTGLSSLPRVRAFDVLTELDEVSFKSSTAAGYDYGGTKGPIRGENHKRAMSRARAIVHDVHEKGVEALKNVIETMVPDVGYTRTQLTDLSEKTKVRNVWGRAFHYILIEGLIANPLIRAFQSVETFYHIGKDPLDSVPKALSQAARAGRWLYAIDWKQFDATVSRFEIEAAFMLVEEKVDFPNDQTAVAFYIAKQLFIHKKIAGPDGKFYWVHKGIPSGSYFTSIIGSIVNRLRIEYLWRTIIGRGPKCCFTQGDDSLSSDDEFIPPERFAEVANSIGWVFNPDKTEYSTIPGEVTFLGRTVQGGMNRRQLKRCIRLLILPEYPVESGRISAYRARSIAEDAGGLSAILNRIAEELEAEYGVASKDEVPLYFKRYIM

SEQ ID NO: 986 - protein, 534 aa, Helianthus annuus leaf-associated partitivirus 3
MEDHTQEPTFHILSEGSHSVDALHLRAGNSRSTTSEDVLPKNYSSETLREIAKYGGYSTYSSNSNTDPYVRESLKLFSREKYEDIRGFTRKPEGTQGMYKALSRFGGEKNTWSQLSRVQQRAMKKAIGNAEKAFKLPYKREPLDWHDVGQYLRRDTSAGATFMGHKKGDVLEEIYHEARWLGHRMKQDGKGTFDPSKMRFPPCLAGQRGGMSEIDDPKTRLIWIYPSEMLVVEGQYAPRMYHDFMADPNTPMLNGKSSQRLYTEWTCGLREGERLYGIDFSAFDSSVPAWLIRVAFRILKKNVEWETWNGKPVSKRDRQKWRNVWDAMVWYFINTAILMPDGRMFRKFKGVPSGSWWTQMVDSVVNHIVVDYLAICQDVPIRGLRVLGDDSAFRSAPRFSLEVASSDTKPLGMTMKPEKCEETDDPADFKLLGTKYRNGVPFRETEEWFKLSLYPESSVWTVEMSLSRLVGLWLGGAMWDKSFCAFIDYFQSCYPCPEEGWFSKDQRRWLEIVYSGKVPRGWTTKKSLFWRACM

SEQ ID NO: 987 - protein, 746 aa, Helianthus cryptic virus 1
MPFTSVRDYRAERLARIKKEMQLFQTVGHDPNAMLESVQDQDYRRYCDNVRYNPDNETKFRILNQEYSTLVQAFRDDNECKHQPYELHQRVPIDAAPMPQSRLPAAGIKAVPLMYHYGHVIRDPTDTVLTDASDDLSESSSDCNDKSTYFGYPVDERIYRLIVARYPEYLGVISTYCRPLGTVEATFADFNKEQIPSDPIDPARKEHILRHVHRFLDTEPYLPLHFVDTQYCKTPLVTGTGYHNRYSYKQRAHAKYSHPEQYRDLPSSKGYFHNSTYENARTIVHMIKKFGSPSPIPYDPLDEDLSDENKQHYVDLLNKFFNDYPTLLFTRNHISRRDGVLKVRPVYAVDDLFIIIELMLTFPLTVQARKQSCCIMYGLETIRGSNHYIERLARSYSTFFSLDWSSYDQRLPRVITDIYYTDFLRSLIVINQGYQPTYEYPVYPDLDEHSLYTRMDNLLRFLHLWYNNMTFVLPDGFAYRRTCCGVPSGLYNTQYLDSFGNLFLIIDSMIEFGFDDVQIDEFVLFILGDDNTGMTTIPIGVIHKFILFLESYALIRYNMVLSSTKSVLTTLRSKIQTLGYECNYGSPVRDISKLVAQLCYPENGLKPHTTSARAIGIAYAAAAQDHKFHSFCHDIYNLFLPYYKPDDRTSLYFQRQILHNLEDGLPDLATPTVPLFPSFYQVLQTYSSYKGPLSYEPKWNYTHFMNDPDKTQPPVKTMRMYEEEHGFVIHNAPTFETVVPSTENFP

SEQ ID NO: 988 - protein, 583 aa, Heterobasidion partitivirus 14
MFSFVPKFVNHISDWFFGPQPDPHGFVHNYKFLGYAKPNPFQRRNETLYSNYQTVVYKALRENLLGYDCEYIINGFHHPAATMDSVLDSMRKGDIPDHPIPMDDHFDRARLETFNRFKPPQLIRPVHFADLRKYNWNWHPNVEEPFYSDQELRTAVQQAHAAGILPDARMSFGNLKNVVFIRVRELLHYIKRNQLTNHRLLYPIMNLHVKPALTSVDDFKVRNIYGVTKIHVLPSAMFFWPLFRYYLDNRDDSPLLWGFETILGGMQMLNSMYLLSRLYYSTYVTVDWSGFDYRAYFSIINNVIQHDCRKFFDFHNGYIPTKFYHSSEADPEHLENLWNWIWTAINKMPVRLPDGTLYQRIHAGIASGLFTTQFLDSWYNALMILTVLDAMGFDISTVSLRVQGDDSIIALIFHIPSSEHIAFKEKFAALALYYFNHIARSEKNKVTNDTQGVEVLGYTNDNGYPRRDWRKLLAQLYHPRDNNPTFQRLKAKVCGFAYASMYADREVINVLKSIWDYLDSIGIKADLLPLQRDIILHSEENFEVPTDHFPTMEEVTQYLRVPKRRTAADSEAYFPMSHFMSHF

SEQ ID NO: 989 - protein, 255 aa, Heterobasidion partitivirus 16
MNIVDLEPDFKNAVPIHGRDPTERNPVTEASNRTIDFALRKFLSQEEADTVINGYRRSPWNEDALNHDIEKLNSQSHKVVKDEHYKNAIKHVYKLIKPDQLLQPVHFADLRHYKWRLSTNCGAPFNSSKNWQDYVTAKYEYFQKGIPFNNIAHRDLFVEAHKNVQPLEITDTRMSKHNLYTELFYIAREHIHRIKDGKTTTRTTGQDLRFWNTAFARQHLVKVHDDDKVRLVFGAPFTLLTAELMFIWATPSPPS

SEQ ID NO: 990 - protein, 620 aa, Heterobasidion partitivirus 4
MEYLTTQFNRITNHFRANTNLELIGHYHYEPKPPRVNEVAISNHKRTLSVSFKQFLTSTEIKLITQDYRRSEMTEDAILADFFANDVEKHDIPFDYHVERGLQAMADAFRPPQLCMPAHINDVEHHYPYKWQVNSEAPFSTDKYFLDNRKPYGDFFDKESLSWKNYVNPEDMQRRIPVPSEQTLAQVTPPKFGFQKGQVFSWVRRWHHIVKSNFTDLTDLASSSYIKDRFVFPMLLHTKTAIVKQNDPNKMRTIWGCSKAWIIADTMLYWELLAYYKLNPGKSPMLWGYETFTGGWLRLNAELHNGLIRSSFLTTDWSRFDKRAYFSLIHRIMAIIRTYLDFNNGYLPNELYPDTRSEWSSDKAQRLEFLFLWTLENLFQAPIVLPDGRMYRRRFAGIPSGLFITQLLDSWYNYTMLATILSALGFDPKSCIIKVQGDDSIIRLYVLIPPHSHEEFLLKMQEIADYYFKSVISTQKSEIGNRLNGREVLSYRNNNGQPYRDEILMLAQFYHTKAKDPSPEITMAQAIGFAYAACGNNRRVHDCLEDIYLYYKRKGYTPSPAGLTVTFGDSPDLPNLPFNLDSFPKIEDVRAYFLHTSYRNEEQQRRTWPAYFSHPPCERP

SEQ ID NO: 991 - protein, 624 aa, Heterobasidion partitivirus 5
MNTLITQFNRITNFFFQTSNLELVGSYHHHPHTNVPLESHHIAHRETLDHAFRKYLYPHEINHITQELRRSEMTQDAILDDFFANDVEPHEIPFDTHVLKGLDSMERAFAPPVKCQPCHINDVEHHYPYKWQVNAEPPFSTDQYFLNNRKTFGEYYDEDSGTFTKYVDPNDAQRRYGTRISANFLSALTPAKFGFMKGSIFSWTRRWHHIIKSGFTDLTGLESTSYLKDRFIFPMLLHTKTAIVKRDDPNKMRTIWGCSKPWIIADTMFYWEYIAYLKLNPGCTPMLWGYETFTGGWLRLNAALFSSYLQHSFLTLDWKRFDKRAYFKLIHAIMLRVRNFLDFDNGYVPNTSYPSTSSDWSQSKAQKLQNLWLWTLECLYFSAIVLPDGRMYKRRFAGIPSGLFITQLLDSWYNYTMLATLLSALGLDPDACIIKVQGDDSIVRLGIFLPPDAHDAFLHKMQTLADFYFKAVISLEKSELRNELNHCEVLSYRHVHGLPYRDEIAMLAQFYHSKAKVPTPSITMAQAIGFAYASCGNNIRVLLVLEDVYNYYKSQGYEPNRAGLTITFGDSPDAVIPHYDLSHFPSQFEIKQFLLSYNYHNKEAAARTWPQTYFLNPPCVRTYV

SEQ ID NO: 992 - protein, 620 aa, Heterobasidion partitivirus 9
MEYLSNLFSRVLKITKTTNFEFVGTYHNQPSIPQVNQIAIDNHQRTIRVAMERYLTSDEFSLITTGYKRTSLDPATITDDFFSGDIEPHDEPQDLASQLAIEAGLNAMQRAFCPPNPARPVHLYDVEWHYPYKWQVNAEVPFSTETYFLKLRKKFSDFYDAASKTWTHYVNPLDALRRYGPEPPFDTLNQVTPPKFGFMKELIFSFVHSWLHVIKSRFHSNAGYTHSNFLRQRFLFPMQLHIKTALVKADQPNKLRSIWGVSKLWIIAETMIYWELIAYMKLNRGSTPMLWGYETFTGGWFRLNAELQSSHLRQSIITIDWSRFDKRAYFWLIRKILFRIRQHLDFNNGYVGTKDYPSSPTDPDKLQALWEWTLEALFDSPIILPDGKMYKRRFAGIPSGLYITQLLDSWYNYTMLAAILTYLGLDPERCIIKVQGDDSIIRLYVLIPPSEHDNFLLKMQEVATHLFASRISDQKSEVRDDLNGAEVLSYRNNRGLPYRDEIQMVAQFYHTKAKDPTPEITMAQAIGFAYAACGNNYRIHSLLEEVYNYYHEQGFTPNPAGLSIVFGDSPDRPDYPIELDHFPTQQETQRFLLSTDYRNAEQDARTWPLLHFLHAPCSRS

SEQ ID NO: 993 - protein, 288 aa, Heterobasidion parviporum partitivirus Fr 110B
MAIIRTYLDFNNGYLPNELYPDTRSEWSSDKAQRLEFLFLWTLENLFQAPIVLPDGRMYRRRFAGIPSGLFITQLLDSWYNYTMLATILSALGFNPKSCIIKVQGDDSIIRLYVLIPPHSHEEFLLKMQEIADYYFKSVISTQKSEIGNRLNGREVLSYRNNNGQPYRDEILMLAQFYHTKAKDPSPEITMAQAIGFAYAACGNNRRVHDCLEDIYLYYKRKGYTPSPAGLTVTFGDSPDLPNLPFNLDSFPKIEDVRAYFLHTSYRNEEQQRRTWPAYFSHPPCERP

SEQ ID NO: 994 - protein, 756 aa, Hymenoscyphus fraxineus partitivirus 1
MPFSIYTLATLFILIRFQLRRRRKQTTPELEYQIRNVLYEWELRSTFPRANPRTGPLFDYSKSLLHFIDLATCKKIKDNIGQSIVAIRQRYTNRDEPFAIREPLDFEALPSNRIPENGIHFSGFRYHKIASADTPIDESSHLIEEDKLFTETTDERSRIIYDSTVDLSGQPAHPEIQQIIHDHFPEFLIFLDEYCRPPSFGPQAFRDFNRPTAAFTRPSPERHEDIMDILRKKFNIVPYRPLHFVDALAADTPLSTSSSYFTKHDPRVRVLANYSTPVRYKDKPTSKGYSFNTVMNTFRTEFHHVKYTRYPFPTSPTDPQNAEKLQQWFLDHPSQLFIRTQISKRDPDAPKKIRPVYSVDERFLHVEKTLITPALAQMRNPQCCVAHGMETFRGAMSLLDKIALRYESFISLDWSHYDQLLPYYVIIAFYLDFLPSLLIISHGYMPSRGYHDTKQDPASFATKIFNTLIFLVSWYLSMTYLSYDGFAYIRDNGGVPSGLLATQLLDSFGNMYIILDCMLEFGFNKAECLAMLFYVLGDDNLIFTLMHIRRITDFMHFMEEYANKRHGMVLSVLKSVYTHLRTKITFLSYENNYGLPSRPIGKLVAQLAFPERPPKPGHDWIHAARALGLAYANCGQDHRFHNLCELVYNKFKPTTSVPTHHVSKIFKKWQYQLPKEFEIKGQEYTFPDFPSLHEIRDLVKDYHGSLHEHDKWNFELFDSKPSDTPPDYVTLKDHIKDHRPEMSSIINEFWHGKRSI

SEQ ID NO: 995 - protein, 579 aa, Hypomyces chrysospermus partitivirus 1
MCLQQPTNLLHLGRYPINRKTKRLLDHHQRVSPREQQFVERLTKKAIYTHCSPELANEAINGYRRSATNPEAGEEGFLKTDLPYHDVPRDFHYKRALKVVEKMFRPSRRLKPISFPDLRYYPWTLPTAAEAPFTESKYWQEIVRQKAREGEIDTDRMSFHNLYNEIFHINRRLVHEIKYGRKPFWTDNGEPLSYEFTYLHSRSHMVKQDKPDKIRAVFGVPKLLLMVENMFIWNIQREYLNAPLGKSPLLWGFETIRGGWMKLIDKLSSKHVTHILSADWSGFDHKALHEVIDDVHDIWRSWFDFDQGYEPSKSNTHDYSDTKSREEQIDRLWTWMCNAIKHTPIKAESGNMYQWQWNGIASGFQQTQLLDSFVNAIYLLTCLSACGINIDSEHFQALFQGDDSVTTFPEMISNPNAFTEKLSNEAKRRFNADLSIEKTTFGTTTDDVDVLSYSNRSGIAYRSSAELLAHLLYPERPRRPAECAAAAAGIAQAAMGSSREVYNTCKDVYHFLVETLEIEPEWKAVSPNKPTPYSMDVQEFPSYLTTFLQNFDHRMRTDQDKQRLWPTIPTGNGFHFLNS

SEQ ID NO: 996 - protein, 476 aa, Ilomantsi partiti-like virus 1
MVSILPRKQGFGQRHHTDPKPSRYLTDIIDPLYYEGLSRSPVNLKLIREDIFKFRNNLKRPTDPLLDMAIAQAYHAFKLPNRVQMLHLNDVFRTELNIWSSSPGLPWTTLGYRTKGELRHHRAITSVRWFWHRIKLGHKIMAPDSCAFVRSHVVETGEAKVRAVWGYPATITFGEAVFAYPLIQAFKKNRTPIAYGYDTAKGGAKKIFSEISGYQFGVALDFKSFDKTVPKWLVEIAFEILSTNIDFVHYNDYGVANAANQYRMFAYIKDYFINTPIRMCDGSRYRKHSGVASGSYFTQLVDSIVNYILINWAFLEQHGHQPEFIRVFGDDSICGSRNWIDFDLIIDQFAKVGMILNLKKSLVTRNKQYLTFLGFTINTGYPTKETKDWFASLMFPERPDQSWDDVATRALGLLHASAGLDYQFDLACRNILAFRPYELNWSRPMQKMLAVMGLDFRELTCTVPSHLQLALRVGYI

SEQ ID NO: 997 - protein, 472 aa, Ilomantsi partiti-like virus 2
MYYVNRSRGFGMRPNNPEPSPYAQALFGEEGAQSARRSELRFKLIKNDMLKMGSNSTVIKDEMFGYVVRAAWDKFKVNPVTPIHLNDIFGMDLDIRKSSPGLPWQPEYATRGEVMDCPSARNRIRWFWHRIKAGEQLTPDDCKVLYRAHIQHDEPKIRAVYGYPTAITLMEACFALPLINEYKLGKTPIAYGFDMAIGGAWKLRSRINKYQHFGCVDFSSFDKTVSAQLIKIAFSILEQNIDIRRYQGRGIPDANRLYRAWDYLIKYFLETPLRLCNGERWKKKAGVPSGSYFTQLIDSVVNWILINYAYLKRYGKLADECHVFGDDSVISSHTPFKLEELSELLELTGMTVNVEKSIYTSCVDEVEFLGFKIEGGFPCRRLDRWMEALYHPEWPDQDWDMFASRALGLFYANCGVEREFAQICRNIVGMRSFTVHLPRDTERMLRHLGVQIADCSPMLPLPEVLVHRLLCM

SEQ ID NO: 998 - protein, 616 aa, Impatiens cryptic virus 1
MDYLLSAFNRITSWFIAPTNFEYVGTFSLPPGLLRTNDVAIANHKRTLEHAFQKYLYDYEISIITKDFRRSEINLDSILIDFFSGDVKPFEIPFDEHVEHGLQCMADAFRPPRPCRPAHILDVKHGYPYKWNVNAEPPFSTDEYFLSQRKTFGEFIQMHEYEHIDKADFFRRHPNIESHDLIKTIVPAKFGYLKSTIFSWTRRWHHIIKSGFTESTGLQTSGYFYNRFIFPMLLHTKTAIVKKDDPDKMRTIWGASKPWIIADTMFYWEYIAWIKLHPGITPMLWGFETFTGGWFRLNNLLFCGFIQRSFLTLDWSRFDKRAYFPLLHRIMDIARTFLTFDEGYVPTHAAPYHPQWDQTKSTRLERLWLWTLENLFEAPIILPDGRMYKRHFAGIPSGLFITQLLDSWYNYTMLATILSALGFNPKYCIIKVQGDDSIIRLTTLIPQEEHDNFMHELVGLATHYFNAVVNIKKSEIANSLNGREVLSYRNHNGFPRRDEIAMLSQFYHTKARDPTPEITMAQAIGFAYASCGNHRRALWVLKDIYEYYRDLGFTPNRAGLTITFGDSPDLMMPEIPLDHFPTTLEIRRYLTLSDYNNEAQNARTWPRTLFISGPAE

SEQ ID NO: 999 - protein, 419 aa, Jalime partiti-like virus 1
MNEGAVRPRDPCLDEAVRRAYHAFKLPERQPLLHLNDVFLQDLPIWNSSPGLPWTQLGYKTKGDIRKDPDAIKRVRWFWHRIKCGQRLGLPDCCAYVRSHLCKVGEAKVRAVWGYPATVTFGEAVFALPLIRAYQRHRTPLAYGYETGAGGMWKIFHQFKGRNFLGIDFSKFDKSLPSWLIEVAFDILACNLDFTRYQDYGVPLSSAMLRMWDVLKTYCIKTKIRMCNGERYLKTSGLASGSYFTQLIGSICNYILLSYAALKFDVKIESILVFGDDSLIGTFDSLTPDNVQTVLEPLGLTVNVEKSGYSRNISNLTFLGYRINAGYPAKDRRKAIAGLVWPERNDRCWDDVASRALGILHANLGVDDVIDLWCRKVVKFREFELILSRDQQRFLDMLKLDVRTPNLPNEFDFFYRLHQ

SEQ ID NO: 1000 - protein, 498 aa, Jilin partiti-like virus 1
MTNMPVYRRMERDRPTKNSLVYITKVEGHTIQKDPQIVDPFVRRALIALLDKDPVEEFSEFTRSFYTEEGHYLNLWKYDRKITPRPGDPDIDLALELTRKAFAPTEPILSIGWDSLGEVPYIPTSSAGWKYKGPKGAPGNHELAISRAVGSLYAWLDSQRPDRDNYPRFRYTPDLAFTRTQLMTMDSPKIRHVWGKAFHNIILEGMSASPLIHYYSRIGQPIVVGVHLYKKLPYLIRTCLWDGEHRRIGVGLDMTSFDTCPMPWLINAIFDMIESYLTFPDEMSHHAFRYTRKFFIDTPVIMPDGRMWLKKLGVPSGSYYTQLVDSMINYTVIMYLQTKMYNQQFTTWVLGDDSLFGIPDELGFPDLDEAARIVKRIGFELSTRKCIVATHPGSLEFLGHVSRGASVDREWSKMILLALFPEREVTDPGQSLARVFGLLVDSALNNTPLITLAHAMEALYSYPEMTSLAREDSNWLRAVVGVEKIPPHVDLVKVWTLT

SEQ ID NO: 1001 - protein, 504 aa, Kacheliba Partiti-like virus
MPLNTGTGYFNRHSYKTRALARLTRPEPYRDKPTSKGFFYNATYKKERHIIHNIKHSKSPRNERKVKSGMISRSKVVKTFFAKRTTMLYTRNHISLKPKEKCRPVYNVDPVFLKLEAMLTFPGMVQMRPMSSCVLYGYETIRGGCHYLDHIAKSFNSYFTIDWSSFDQRVPRPITDIYYTDFLESLLVISHDYSPTLDHHPEQPQPTDVFFKKMSNLLHCLHEWYNSMVYITADGYAYQRLFAGVPSGLLNTQLLDSFVNLYLIIDGLLEYGFSPDEIRTFKFFIMGDDNSGMTNLPLQELEKFIAFFETYAQERWNMTLSQVKSIITSLRNKIEVLGYQVNFGTPYRLIDKLVAQLSYPEHGLKPKYMSYRALGIAYAAAGQDYEFHQFCRDVYMAFIEDKADLTSELKDKLRKHLSGAMRSDDDIFTDINFGKFPSIEEVRSVYREWKGSLQYSPKWDYSYFLTKPFVEEENYITMEQYRKIHNISRLPVRQYRIDDKIIRQ

SEQ ID NO: 1002 - protein, 569 aa, Kagbo partiti-like virus
PAKSHTMRNDYELDSNPGSCDAPIPIIRKYDENHPYEFEWRAPPQVEGLTLGPAMRQLEKRAPFPASYFPPHISVNACYVFDQCGMKAERVELLSKYQRSWVTQDSLRKSTLGYSHVKYAPAFNDSRLDEAIEFVRDEFVHALKEPLKSWTIEKVMKEGDMPKNTSPGLPYIQQGYRSKADVWKDHHQDIEEEHIRIREGYRPRTPDCAAFARSIVCEKPKNKVRLVWAYPLEQVLLEAKYVQPLLQAMTSQKIGQTVAYGAETMRGGMEWLNTELHSLPRQNYICIDFSSFDQTVPAWLIRIAFDILEECFTTTEVEDVNGRIVKTNDRVVAREWRQIKHYFINTPLRMEDGTRYEKTGGVPSGSCFTNIVDSIVNMIVMRYVLMSTAGEWPNFLTVLGDDSVTATTGLVNLNDMAQVAKDKFGMIINVEKSYWTQYIGNVQFLGYYNHHGYPARDEDTLLAGLLLPDSSVDESLALTAARFLGISQASCGASRACIKLTKYLFRELERRGKNFVVDAQKLYHIQKAGGWLPAAGEKPEPLPAVPFLEYAVLPKHSCEKLKQGIRLAR

SEQ ID NO: 1003 - protein, 622 aa, Kummerowia striata partitivirus
MPVGAARADSTRSKPVCTLKESEAVMLPVHERAGIEILGPYRSKGKSRKLADALHALSRVVEVPAIDVHLFQAIRDRFGIRLNVDEENRSVTSDQWVERALLAYGCPIHRFYGDGPNASRKRPPACTCIQRGQRGLEVRNSGNGATGPTRGGTGERAESSAETQGESYIAPTDRGQRGPAVRSLREDFRGDTLPGLSAGVAVGSARGPQQAEAHRAAIRSVYSAASSVEGRRKPIARTEVVAHHIHASSYAGLPHLCANELALETGLRLAGQIADNKRGFDPYLFGRRVQPGLFGPKTRLVWMAPLASTIIGLAFARPVQEALARNRPYIWGLRHHEEGAILAEFSGRYRYAYCLDWSQFDSSVPASLINDMFRVVRSMLDLTVEEDGLFHRYVNDFIHTRIVLPDGNVYQVHRGVPSGSAFTSLIDSMVNVYLVNYVWYRLTGHVLSHKQILVMGDDVVVGTSERLELAEIARVADELGFKLNTVKSVIVNTHEEGHGIHFIGHSWSRGRARRPQRELLQRASLPERHAEQSKSRSLTRLGGYALSSVDGLIILIELYPEESITGSVIRFLDDLRGHGGGSRLRAHDLPGDLRRRVMIEGAETPDVGVGSGPHGLLFGSLF

SEQ ID NO: 1004 - protein, 547 aa, Kuusamo partiti-like virus
MAFLRYSISHRMTHGRAHVYIEDVKYAPPLPFTSRHGGLPPYIVPLPSAFKGFSYDMSLPYVDFKAMRACYEAGADDITRKVLYGTRRSRITTDYLYDSVLNYGYQTPPRLTDDIYQRCLAELEVELNVDEKFEPLSIEEAATRIPQNTSPGLPWIQLMPTAKKGEVLAQHFNTIKREWEKVAEGNRKYPLPDCAAFGRSHIGPADVNKVRGVWVVPLTVVVAEARFALPIIDQLTSQKIGHHTAYGCEMMKGGMSWVNMQALRAKVKDPGTKFLMTDYSSFDANVPAWIIRDCFAILRKKMNMTAADANVYRRLVSYFINTPIQFSDKRRLLKQHGVPSGSMWTNIIDTMVNFIQTRYLVYTLTRTEPIFDVYFGDDGLIALPGHAILNLDDISKIAMEKFGAVISPKKSYWTNRPENIHFLGYYNNRGTCYKKPEGLIASFLYPQHMQDDWAYTLARGFGVLLASGGDKTIFRIVQRTWIMACRKEGAVEKAINLVTTHPRMVRHLTQMGTDVDKVSPELLMDVRLTVPEDDCRKIVNGICLVRG

SEQ ID NO: 1005 - protein, 377 aa, Lampyris noctiluca partitivirus-like virus 1
MDNWGSSPGLPWRQLGFKTKRQVADDPYAFQSIRRFWHLVKEGNKVSLPDCAAFVRPHLVERGEKKVRAVWGYPCTVSFQEACFALPLIEAYKKVNTPFAYGYETARGGCRRIFLRFVKHKHFLSNDYKSFDKTIPPWLTRIAFDILLSNLDLTEYQDRGIPDSEKLYRAWKKLVKYFIETPIRLCNGERYRKKKGIASGSYFTQLIGSIANYIATKYCILSQNIQVKDMLVLGDDSLVATDRAVSLDQLVSDAKRFGLIINDSKTQRVNNVRDVKFLGYTINDGGPSRPRKELCAALAHPERPDQDFNEFATRTLGLMIANFGHDVDFHCLCFQILQSPFKLSYNPSFVRYLRVLGIEELPKAPPDLFKLQLMRYR

SEQ ID NO: 1006 - protein, 436 aa, Lampyris noctiluca partitivirus-like virus 2
MLSTFLFPELSVHSARPTKTYAQSRDPASVIRQFRKRHLLTPPPDFEMPKHFSFLEESYKPLHFNDSLALFTPSSLASSPGFFYQNLGYKTKGDVLRSRKAVNHLRRRVHFIKQGQYKPAAPAGVFVARSIYDLQKQKIKRRVAWAFPIEVTVMEAMFARPVIDSLPCDYIPKPQTHHHRYCQTGVQLDFNSFDASVPHWLVDMALCDLFSRFDLSTYACGNKVSHGNSLIHVLTYLREYITRTPYKVGNKWYKKYHGVPSGSMFTNILDSMISEAVIRYCHKDCGQIDVCTYGDDTRYRCKSNTCTSQRIVARLKESFGMIARDEGTFRYGCLAYCKQRCFLGIPYVTGEWIMNILSCLKSRKYIRAVAHQLKQPPFPLQPWQKEELGSTVPGKLPARLKKYLKEIQPPTKHPVSGLSNQRSCEAQRRLLRLISP

SEQ ID NO: 1007 - protein, 538 aa, Laodelphax striatella associated partitivirus
MTDYTFDPTPNVFVEGSHLIDELHLRAGHSRVATSEGVIPSQFKSDTLREIAKYGGYSTYNVQSNTDPFVRETLKTFSRDIYEDIRGYTRRPEGNIGMYKSLLKFSDETNSFDKLNRVQRRAMIGAIGKARKAFRLPLKREPLDWHHIGQYLRRDTAAGVTFMGQKKGDVMEDIYHEARWLGHRLKQDGRGRFNPTQVKFPPCLAGQRGGMSEIDNPKTRLVWIYPAEMLVVEGQYAPRMYRDYMSDPYSPMLNGKSAQRLYTEWTCNLKEGETLYGIDFSSFDTKVPAWLIHVAFKILRQNIDWEYFDGKKVGKRESQKWRNVWDAMVWYFINTPILMPDGRMFRKYRGVPSGSWFTQMIDSVVNYIMVDYLATCQEVEIRNLKVLGDDSAFRSGSEFDLPTAEKDASAVGMVMHPEKCEKTEDPSEFKLLGTTYRDNHAYRSTDDWFKLALYPESAVPTVDTSLTRLIGLWIGGAMFDRVFCEYIEYFQRCYPCPEEGWFSKDQRRWLEIVFSGKAPRGWTTKRSLFWRSIFFAYG

SEQ ID NO: 1008 - protein, 242 aa, Largetooth flounder partiti-like virus
QMAVMCSRSTFKTGFNWFKGDHRRMLSDIGDRRAISLDVGAFDMSWLDWQIRDAFDILKTKLAMNEEQAAVFASLASYFVNTPVIHEGRVTTHPGIPSGSGFTHLIGCTLNAIMLNYLDPSLAWYAVYGDDSVIVSTKPLSYYFKRAAVVGIELSKMKSRVGIDWLGFRLDTGLPEIINPTKRMASLLLPERPDNDDGTFYGRVLGHLVASLGDPRISGVLLSWLETNCRYHATRTIPRDMA

SEQ ID NO: 1009 - protein, 584 aa, Lasiodiplodia ziziphi partitivirus 1
MEYLGSLLSKLSIFDPRDRNFLFVGYRNPFSVFKPRSKEHDEHESTVLDSLKRHLYPWDYDEVLSYTITTPTNDDVEKDFFSGDIPNHQVLRDSHYLNALDIIITKFQPPQQVRPVHFADLRLYPWKWHPSAEAPFADHAKYLRMLEQQYQAGQIPDRRPSFGNLKDLIFGVVRQQLHKIKHGLVDPDAYLYYFRTHAKPALVKRDDIDPDTGKTKNKVRMIFGAPKTFILAEAMFFWPLFNYYQTHIGASPLLWGYETLNGGWLRLNEELNCSLIKGSILMVDWKRFDKYALFSVITDIMQGVRSYFNFNAGYIPTTTAPSHPNLHPLHPQWLENLWDWTCYARFNIPTLLPSGRVYQRLHAGIPSGMFTTNFLDSMYNGTQILTCLSSLGISVDLDVFIKLMGDDSLTRILVIIPTSQHLDFIQAMQDKASLYFNAQISIEKSKMSNRPYGSEVLSYVNNNGFPVRNYNELLARLLYTKSKRPRPEVTMAISIGIYYASAGNCSYLREVCLDVYTRYFLQGYRADKSALSSYFDPNFFDSVDIDFDNFPSRQDVQKRLTTFSERSEKRSRDYWPSWYFLDTF

SEQ ID NO: 1010 - protein, 1869 aa, Lentinula edodes partitivirus 2
MFYTLPLVVFFHLLSSAAGSLKLNAEFMLFAGFVTSCSTFVQTEPFWWDVTMNVADALSLVSVFTFARFYAHGFLRVVNRENIIPLVDWFLGMGHMVYFWFILYGVLTAHGLVLVLLMSLPLVQFWFLIWFCIPLLIILDFSFILLLVDMIYHVFFGHPIGSVNAPRSILILGRLARSLFIHLGHFVYQLAHPREFIIGSVLFVKLLVSVPLELLTLIFRDGVTVRSNARFRHVTLKFSFGLNLVLFHLLNFKLLFWLCVIPVVSCLSYGSLTLYWLFGTSVINPIVLGFLNNLLVFVGSDLSAVSGFLSDDLQDSLLGLRLFVHFKTTSDVIHVRVPGLDLIVDPSFDLRSASRPIKDKLFKIFFSSNSNLTLTPIYMVILGLVIFRFCFIRSIRFVRPVFRAPVVFFECIILMFIPWLIPDVAYDFVTYGFYKFLELLVHPKFDLWIEVKKWLRFAGLGSFVGMSYLSGPLEGQLQGGLDVESRLSQIFVLSWVSMTRRSVLKFVELMDQVRLPEMVQASYNPPSLDSIRSTYVSLQGMGFPVDQSFIESLERPESSSYLAEWGSWRNWMIGTSNFKLGFRSVATTLHSWLPANFFPEVPGYIHSATFTGVVEEITATARYWTGNDLKSLPDGSDLDELVEDVWTGVKAQYDKSQLATFDEIYQKWTKRFNMGYGFGKIGKNGRLRQLTRQAVIDSMGGKKPFLKIWEKVFYNAQKLLMPSPVFTKWETLKLKKALSRSVRTVVGSAFTHHVMTTVFNYRPNHNYHPWETPSKVGMPINGQNYNRLWESLMRHEKVWAGDMTAFDSTQAPVILSVCAEIRKKGYTFHTDYHRICQLIDISYEMLRDQPMAFKNFGDIAIKTQGATTGHSSTTPDNTIMLLVNYMYAWRRVTGLRSREFFNFNTLVNFGDDHCLGYDSVFGWSPDAAVKAMAELGTIMRDEAPGQSSLPVEGKLPPGKTDFRDQDFAFLSKMPLPLDASIRSELAAAGIGCQLSFATCHDKRRLLGKVKGQVLKAKGANILSSYDALISYLYLTAHHHDVYLEISKKATSMYLKVCNQVRRSGGSIKKIQRPPSYNTVLRTWYLTEAFPYKNDELDENDENLDHIFIMSSPDAFGVFVRWISDFPTLLSPRYKNVRWADWIQQKLCDHLAWPLTFVAAANGVSNDLSTAKLLLSRSPYSFLRNEAIIINDTSPDAFGRNLVRHWLYLGFSRVFTYRKGFSPLDLIRLFDSFYINAVFILTGRITQVAVELDLHILDTLVILLLNNVFIEIPFPPVLFDLLSPSIIIARLLTFTFSLIQPAGSIDFQSLDEQVRHLITRPDASFVLSAPTGVGKSTRVMNRIQDLTGLKLTVVVPRQAVVLNVGKYMQTLYPNSGIGLSCEGHTFDVNDRIVYCTAQSFFLNERLRDPSRLMVLDEAHIYEPHYITLRSFLAGPAYRKIFVTATPLDDFNLPVLKIPAVSSFNVISKTISDSSLDAYLKAASGFANDRLSNEKILIFVPTIAHMDRLIMNIRHRSTRISSKHRNFDSTATVFVSTSVTDAGVTIPDVSFVLSPDLDIGVSEAISVNEDPAITTYFFKLSKQTIRQRMGRTGRTCDGVFLLFEIVGLPISDRKYTYPDFISNLAPASQFASSFFPQDVLQTVPDNISAGLATYDMNRVAYGTLLRRYNEAIADASGYLEYWNRRVRDIINHRPAKRLNPMDPDELPIDDWKYSEVPEDADPIAPPVKKEPSTMPRTLSKINVSGSGYLCGSRALRGLIYTHFNVLFSEQLMTELLHQRTQYQDLNFFHFDDIRDLAWYGFRLRLTLDSSLMPNYTHPYFMDGPLPDGYREGVLFLEHAHYNYLGYPVEGHDTDGRIQEFLQPQYLNLNPV

SEQ ID NO: 1011 - protein, 706 aa, Lentinula edodes partitivirus 2
MAFQQVRNYLQEFRNTVKLEWNIFNRYSLKDSDADYPVSDSDLRRLQTGFRSRYESELTDEYKHNYDQLYKSFELKDATSGFNFEFYEDYDLARTPDHRQPVPGIQQLPVKLHSEQIVTADATVPESGYALHPKIHRLVYRQYPQYITHVEKYCRPLGTTDATFSDFNKEQKEYPPVPTDMILQIVLIIQYLLNALPFRPMHYVDTFFAKMPLHTGTSYFYRHSYSMRTHAAYAHPAEYASKRTSKGYFLNSFTEWARTVVHRIKEFGYPFDPTSLSPTDIRNRLRNFFISHATMLFTRNHISDRDGFLKQRPVYAMDTLFLHLECMLTFPLHIMARSMKSSLMYSIETIRGGCHYMDRVAQDYRSYLCIDWSSFDQRMPWIIVDSFFTVFLPMLLIISHGYQPTHEYPTYPDLTPDMLFSRLFNILCFLRTWYFNCVFVTADGFAYIRLFAGIASGMLNTQYLDSYCNLFLIIHALFHFGCSRDEILSFCFFVMGDDNVVLSRWTISRLTAFLVFFEDHALTRFGMVLSKTKSIITTMRIRIEMLGYRCNGGHPDRPLAKLVAQLCYPEHGPIDKYMSSRAVGMAWASAGMDHIFYQFCRDMYFLFLDSAEHPDQHAIASISKHLPGIFKVLDDIEEFVSPDRFPDLNEIRDRFSHWQGELDPNKKWSPAHFTDPPFVDLPNRQTMMDYMLANNIQFPDVERLFA

SEQ ID NO: 1012 - protein, 563 aa, Lentinula edodes partitivirus 3
MNSLIQQLSDLSLNWPSQNLAFVGIDPFHGSAQPFKMDPNDWAFHLQIFVASVICLYAFLFPVNVVQLALHGFRRSQVSGPKAEQFFFRYDVPRHDIVKDKYYYEAIRIVCNWFRPKWKIHPVHFTDLRWYPWKLDTSAERPFSVQYRHLGSTKFSKLYNLVFEYTRTVIHRFKDGLTFNYDPITLHVKPALVFQWAEDKVRTVWGIPKYLIFSEAMFFWPLFSHYHTERQTPLLWNYESLNGGWYRLTHEWFKHKGIYFNLDWSEFDMRVYFSMWLDIINEVSTFFCFCGKYCPTRTYPSPRTSPQRITSLWNRITDMYFNMPCVTPMGNVFKRLYAGMPSGIFCTQFYDSVYNGVMIVTCLLSLGVPIPEDFPIKLMGDDVLFVLLMDLPFEHWPEFLEALASEALWRFGSKLNPDKAHVSPSIQGAFVLGYSNNNGLPTRDPAELLAKLLHPKSLRDTPGNLMARSIGIYYASAGDRRFRPICLHIYDHFARLGFKPSIKGLASLFDPTGLRLTEEDLQRFPTQTEVLARIAKPSARNPELQAKYWPREHFLSEAGFVQC

SEQ ID NO: 1013 - protein, 577 aa, Lentinula edodes partitivirus 4
MCFSTNLRYLGKYRPYGKPWSFRPQQFSKSGARQQDFLRRTILKGLHNTLPEETVSNIRDGYYRSPTDPQSAEDDFKKTDQPYHPIKRDRHYRKALRVVEKMFRPTRRLKPIHFADLRAYPWTLNTSAEWPYRGDKRWEDHVKQKYREGEVDSIHLNFHNLYDEIFDANRWNIHLIKDGKAPFWKDGEPVPYGFTFLHSRSHLRRIDQDPKIRAVFGVPKLLLMAENMFIWNLQREYQNRPLHTGPLLWGYETFRAGWNKLASRLSRHPIKSIISTDWSGFDHKALHELIDDIHEMWRNWFDFDQGYEPSENDDHSYKYSKTDPLRLQNLWDWMTNAIKKTPIIAESGNMYEWNFNGIASGFQQTQLLDSFVNAVMILTCLSAAGINIESEHFQALFQGDDSIIAFPEIVDFLPFLRRVSDEAKLRFNADISPDKTTHGEWFDGIEVLSYTYQGGLARRDPDEVLAHLLYPERLRNDEETAAACCGLASALMGCSLPHYLALKDIFVFLVDVLKIQPRLPKAEEKIFELIALPKLTDFPTFEETFLQNLDIRGRTEAQRQQLWPTKPRGEKNFHFLE

SEQ ID NO: 1014 - protein, 518 aa, Lestijarvi partiti-like virus
MIELEKRAPFPCSYFPPRVSVNACYAFDKCNLKEKRVELLSKYQRSWVTKDTLRQSTLGYSRIEYAKKFDDDRLFNCIESVRSEFKYALSKPLTSWTIEKVMKDGDMPKTTSPGLPYIQQGYKTKLDAWKDDQATIAHAHELIRKGHSVQMPDCAAFARSIVSEKPKNKVRLVWAYPLSMVLLEAKYTQPLLQAMTSQKIGTSVAYGAETMRGGMLWLHNQLTKMPSQNYVCMDYSAFDQTIPPWLIRIAFDILEECFTTSEVEDVDGMHRTNAFAVAREWRQIKHYFINTPLRMEDGTRYRKTGGVPSGSCFTNIVDSIVNMIVTRYVMRTCTGQMPNFLTVLGDDSVIATRGLVNLDDIARIAKDKFGMIVNVEKSYWTTRVDNVQFLGYYNHYGYPARDEETLLAGLLLPDTSVDETLELTAARFLGLSQASCGNSIWIPLLTEFLFAEMKLRGKEFIVDAHKLYHIQKSTGWLPAAGEKPEPLPGIQDLRKSILPKTTCLKFSRGVDLTNNEGV

SEQ ID NO: 1015 - protein, 475 aa, Leuven Partiti-like virus 1
MKYLGYAPGFGMRPGSDTLSPYAVAAFGPQPHLRPRSQLSYRLVEKDLMEMGSNQNTLNFQDPLIKEAQFHTAQAFRFDTRVKPIHLNDIFDMEFEFRHSSPGIPWQPDYATRGDVMDDFTARNSIRWFWHRIKKGEKVSLPDTKVLYRAHIAESSGKPKIRAVYGFPTTITLAEAQFAVPLIAGFKKYDTPLSYQFDMVTGGANKLRGQIAKFKRYLCLDFKGFDKSVSADMIRMAFDVLEQNINWTEYQNHGVPDASRLYRVWQSLINYFINTNVRLCDGRRFLKNAGIPSGSFFTQLIDSIVNHFLLTYAFLVLKNRRPHYIRVFGDDSVIADSDFVHICDIARVMYDLGMMINLSKSIQTEDIDKVEYLGFCIRGGFPHRGYNKWLESLYHPERADLEWDDFASRALGLFYANHGVHERFDEMCRQVIGYRPFHIRMSRDFKRFLAGLGISHSTMSTDLPDRMRLLFSLIG

SEQ ID NO: 1016 - protein, 472 aa, Leuven Partiti-like virus 2
MTYALQKSCGFGQRLFKTVNPSPYLNQLIDPNLGLARSTVTIQAIRNDVLKFGNSTKYDFANDGYMTMAVNAAYRAFMLPHPVRMIHLNDVFTLDLPIWKSSPGLPWREYGYKTKGELRHDVDAIRQIRKFWHIIKRGDKMHPPDCCAYVRSHVTDIGESKIRAVWGYPATLTLGEAVFAIPLIDAYRKCGTPIAYGYETALGGMKKLYKEAHGKYFVAIDFSSFDKNVPKYLIDVAFDIFLRNLDLSYYRDHGVASADRMQIMYNYIRNYFINTPIRLCNGERYKKTSGVASGSYFTQLVDSVVNYILITWLTLKCKASIDWIKVMGDDSIFGTDTLIDLDDFQDLAHLLGMEINIKKSAVSKYLSNLTFLGYQINDGIPSRPLETWMASLLYPEHPDRNWDDVASRALGLLYANAAVTQKFDGLCRMIVSLRPYDLNVSRGMARYLFMQGIYHLEKEPPDMFYFMSRLHI

SEQ ID NO: 1017 - protein, 525 aa, Leuven Partiti-like virus 3
MEPLPSKKGFQIDTRHHGLDRDACMFANAAFGRHQVDHAISTLHRSVASHEEIKADILSYDRKYINSKVRQTDNYRMVLQSVRDDFLSQEKLIPLTLGGAWEHPEFPKDKSPGLPWTERGFKTKGAVLDDTSARNEILGRWDAIGRGRDTGLPDTAAFFRAQVVTKDKNKIRGVWGVPLDVISEEARFFLPYIKFLKQSNAPIAYRLEMATGGMAYIDDMIRHHRGKPMMMTDIKEFDKAVPPWLIRDAFNIIFDSMDFEHVIGSDGNIWNVNSDRTRRRINRLIKYFINTPVRLPSGERYRKSGGVPSGSMFTNIIDTIVNVILTRFSVYETTGHLPLGEMYLGDDSFVICDGVLNLSAVAEVAQENFGMTVHPDKSYVTDNPMNVQFLGYYNRRGLPYKGHAFLIASFIYPERYVKTPLIRTSRAIGQMWSTMHSGMAAPWHRLVQHMLKYYGIEPGDVYDFITTHPGQFRYLTMLGITPEQLTLPERICELVPAIDPPCYPLRDYVYVAKDTADIFSRSVDL

SEQ ID NO: 1018 - protein, 454 aa, Leuven Partiti-like virus 4
MAFNNLALPHYARYFKTQFTRYRPQPSDFKSKVLPYLTSKPNRPKDAVYLSALATVRRLFALPAKVNPLHINDSIKYFQNGDKSPGLPYTARGIKQKRDVPVNEIKQYVHNVKYGIYQHCRTPCTGAARTMISKSTEKKFRLIWVYPAHMTLAEGMFAQPLIWAYQRLEGPYGIWIQYARGDAKRLMAAKRFPSQRWLGMDWTAFDANVPSWMIRDAFQILREQMDFSKYQERGVPTHDFTLDTLWNHLVHYFINTPIKLPTGEVLKTRRGVPSGSYFTNILDSVINAIAVHYCLESLNVRYSKCWFMGDDSLVLISKPALNIDDLARIAFVTFGFELNTSKSDFSPHSVKFLGFTLKGGRPYADYDKLVGMLICPSSRDVCEQDFIARARALQLSCFGIGCMRFTAEIDEFLIRVGHETAYPSLHPKNELVSKLQQMGLADWPPLSKVMDAVM

SEQ ID NO: 1019 - protein, 534 aa, Leuven Partiti-like virus 5
MAFLRTKINPRYHTIDITSFEYPRITLDVKIPLIQRGTILESGKGFSFKLEKPSVSFKTYRALCEHGLKGEADRVLSTMRRSFLTPDSIWSGVLKFGGITAKKTTFKGYNKALLDLRRELNIDDKIQPISMDEGFPHLPQSTSPGLPFIHTHPGLKKGDIINRYSHKLKNYWDRVGSKQKNIPLPDCAAFARSHITSSKENKVRPVWAYPLYVISEESRYVVPLLEKIKNQECLVHTAYGMEMLKGGMTWLNHQLQRARKRGAEKMLCLDFSAFDASIPAWLIRDVFNILKEKFVLTEADQLKWKLMVNYFINTPIRNMDGRRFQKEHGIPSGSMFTNIIGCCINFVMIRTILDAQVKVEFLNVFGDDSITAVKGIVNIPQIAEDFKNIFGTIINVKKSYYTTRLENVHYLGYYNFHGDPVKSTAELLASMLYPQYLKDDWGYVLARALGCALASCGNNVNVFIAARGCYIKGKRENVENVPVALRLIKSDSRMKRHLDVMGCGDWNFDEQMFWRNENFFPRLDCTKLRMGIQH

SEQ ID NO: 1020 - protein, 500 aa, Lichen partiti-like RNA virus 1
MDSKINFPEDCFYCKKYHGTKNCLLPFDVVRKIQIPTDFALAIMEITHLHDVYGDSILKHNSTMTKLSDDTEQYELNERTLKFNSVAIKTGNLLSKADLPNEETRLEYHNSETQTEESATGAAVIGESIGELKPKSQTLPYNVKGKEIGKSYANALQSTESRSSWSDQVEEEILLKEKEASDKVCELATNVCNELSLPTQENEGHLFDELLKIIKLCRNIAKINRSTIPSKKLLESILYETEQLNKFGTKYKKTNSSKLDGEIAFSKELVTIHNHEHMFNWCDGIKSLHGDYCILNYDQLSLQSLTSKRDGETLEDACIEIFKSFRYSKLISKESKDEIDSAIKFELERQNYLDAYQWLANKTSLKKGSSALKDLSKVSRKYSELAKYPALDERLLYHIDDNLKQIVHESLSNQAKNVPRLGNEVNLEDYFFKLTAYFLKTNRGWKNENSFSNPSHLTKLQEHTQVIVPDSESLKVFRILKSSIDNFRISYKKKYVMNVQ

SEQ ID NO: 1021 - protein, 588 aa, Lichen partiti-like RNA virus 2
MEYLSKLTERLSIREKFNKNFLYIGFRNPFSVWKPRTKGHDEHEHTVLHYMIQNMYPWDYEDVMSYKMTTTTNDDVENDFFSGDIEQHQVPKDENYLTALTTVSDMFRPSHLIRPVHFADLRLYPWNKKPSAEPPFSDHKKYLSWLNESFLNGTIPNRKPSFANLQDLIFGITRQQIHKIKEAEADPDDYLYYCKTHAKPALVKRDDIDPETGKTRNKVRMIFGVPKLMIFAEAMFFWPLFEHYQANIGSTPLLWGYETLNGGWLRLNDELMRSHLRSSILMIDWKRFDKYALFDVIDDIIDKVRLYFDFDNGYVPTTRNPVYNNWKERKQPQRLQNLWDWTCYARKAIPTVLPSGRLYKRLFAGIPSGMFTTNFLDSIYNAVMLITILNSLGIRIDPTNFRSFVFKLMGDDSLTQLPMLIPPNQHSEFLLSFQNKADHYFRSIVSIDKSKLCNRPFGSEVLSYFNNNGFPVRDYNELLARLLWTKSKNPRPELTMAACIGIYYASAGNCTYLREVCFSIYEHYRVQGFKADRSAVLGFFDPNILRNIDIEVDKFPTLSDVQKRLTTLSMRSSERAEKYWPSWHFLSY

SEQ ID NO: 1022 - protein, 568 aa, Lichen partiti-like RNA virus sp.
MKNPHYTLMNPINIKHIGTGTPYPLHERLGLNFQCYNIVVKGLNKHLQAHDVLNVMYGYRRSTMSEDKLVEDYFRGNVPYHKVIKDEHYYAALKRMDELFKPPGKLHPVHYADLRFYPWTLPTSVEAPFSESEWHRKVVEVKFQRGLIPDTRMTFHNLYNEVFVHNRTTFHRIKDGIYTDVQGRDAKYWNTAHARSHLVKATDPDKIRMVFGVPKLLLMAEMSFVWPIFNHLLNLEQHSPMLWGFETFKGGWYKLRKYFSEYHPRLKTFLSLDWSQFDKRARFEVIDDIHSIWREWFDFSRYWPTHWYPDAHTDTWRIENLWNWMTDAIKHTPDKLPNGNLYQRQHAGIASGFLQTQFLDSCYNTIMVLTTLSRMGYDITKIVLKVQGDDSLVGLLTSIPDIVHQSFLDTFAHYAEEYFGAILSTKKSKIHNSLDHVHVLGFKNVNGHPYREEQELLASLLHPERGMDQSRLMARAIGISYANCGVSTSVYAVCEDIYGYLKSQGFSPNKSGIPDMIKYLYIDQQLPEQFLTNLQFPSFFDTFKDLVSTEFRSDAQKQRLWPLDHFLY

SEQ ID NO: 1023 - protein, 548 aa, Linepithema humile partiti-like virus 1
MEEAQVSRKTAILRLAPDKGFPFNLLPARIDRLARDAAIEAFGPQLVEDVMAKYHRSALNYDDLLADLMGYDRVHRSSLRNDPVYQMVYQSIREDFINESEKVIPYTTGAVPSLPDFPKNKSSGLPWKLEGLTTKQQVVDAGGLDSNRKLWHEISFSRRHIPLPDVCLFARAQVCEYGTSKIRATWGYPFDVYIEEARFFYPILDYVSSDKCKFPVAYGLEMANGAMAEIERVAKRLNCKSIIMDWKSFDKTIPPWLIRDSFALIAEMIDMSHVRDVEGKVWPVRENRSRKRWKRLVDYFVETPIRTSKGERFLVTGGVPSGSCFTNIIDSIVNAIVTRYIHYQTTGELPLAEVYLGDDSVTFTNQMVNLDDMTRLADDKFGMIINPKKSFITTNRRNIHFLGYYNFEGLPFKPQDTLIASFIAPERTRTTAVEAAAAALGQLWSGMDPHYATCWITILDFINRKYGVTKNDVLDHLSRNLGRHKYLRLIGLSFNDISWPEISKSSWCVLKVLPKNRIKKRILIRNWIYEELASNSYDYWRFIEDNDE

SEQ ID NO: 1024 - protein, 479 aa, Linepithema humile partiti-like virus 1
MPLNSNTTSTNRGQRRPEGTVPVSSTSQEVRNEANTSSVQSPTATQASVQKDPPRRKRFVGRPRPPRQLDAKPQVPKPAFLSTTATPIKNDPLYMSALVPHPGAELRPTSSSKHIQSSAIGITDVSTQIYQELVANSTGFARRVPSSAFQCYAATLVFAAMLKKHESNGFNLKTAEREFSNSVIDAKLKPPTMLTSYMDGFGNTTLPSGRELIFRMLPRNYVEDETTGTIGWFGKVDPQTHYMYMEYPNLAVYMYRITQDIRYTANRDLDPDWNLPGDIAPAEALNAGLPNVNLLGYHSAEALKPEQVRFLRESGMTANGDFVSDNDVIPVNLGLLLAVQNEIDAVTKAVSTKLPNYAIDGSQAQIPLVHPLHTKDRRLEKHQDLELTSPVQINGALVVIDGGFVYRMRHHITEQVRETNNWSIYNFTHFTGVPPTWRNTANTIRSDEDELLQVAEFRTVPHNLKARIHDIGAAFKPVA

SEQ ID NO: 1025 - protein, 409 aa, Lippman partiti-like virus
ERDRLTTAVSRVRKALKGMGLVKPVDLDVAFEWLLSAKENNFAGLPTMGKKGDDVDALARAKACERGKCPPPAIIGHRGKNTVVARAVWMFPFEWHICEGAFFIPLQEKFKRNVHVYAASNAVARRALFNELATSGIFHSKLAMDYSGFDGSVGTQVIGIAFGLLREHLLLDSRQEKLWNRVATYFATCPFVNQHGELVTGRRGGVPSGSMFTQMIDSIVNAIVIEYSLPVEQKKRYFVYGDDSVTYLQCGVRETENLLNDVKRRAGELGICVNLKKTHVCEPTAVTTFLGHYDLRNGRPADEVLARLIFPERPFKVDAESLRTRVISYMAESDEVTGVLLPVYWILTKVAGRRDVRANVPSFARNGASWLTHAELGSLNPRNLPGLAQFLTNEDPTLVSAYLRIRAAV

SEQ ID NO: 1026 - protein, 346 aa, Lloydbraun partiti-like virus
LAFKRTQFNDKTRLVWGYPYSMTAIEGLCAYPLLEQFKRGNTPMAFSMTSGALGTKLRVASYHHEWAYSLDFSQFDATISAMLIHVAFDILRTWFDKDQVDVVSGKTTMEVFDVIENYFIHTPIVMPNSKLYLGKGYGVPSGSYFTQVVDSIVNVIVAGAISARFHLNVDKREIFVLGDDLLMWSNRKVDLNLMSQYVAQEFQMQLHGAEKSAIYHYDETIHFLGRDWTNGMPSLAVEEVVKRMVFPEKFRKYSKDRAKREREVRLLLLSYAANYRCAWRIAYLAVDPSDRNIHNGCANVDVNAYCHASPGVNPEFLSGLMRYRLKYGLENQDAYGIPSTALQYWL

SEQ ID NO: 1027 - protein, 435 aa, Lomandra cryptic virus 1
VPTTLLLELAGWARSYYQLEQHVKAILAYDREKLPEPTDVSWNQTKQHTESKFRRFEKVQSLSYQNFDAVHWMQSSAAGYGYVGRKGDNENYKRAKRTAVTIAEKLDHNRSYGPEAIENSTPDVAFTRTQLSQLKVKTKVRNVWGEAFHYVLLESLFSEPLVDFFKEEESFYFIGQDPLLAVPALVEEILSSKDYVYMFDWSQFDATVQEWEIRFAFDCLENMLTFPSNVEFQIWRFIIELFIYRKIAGPNGVLYLKSQGIPSGSCFTNIVGSITNYVRIQYMFQRLTSHFATVFTHGDDSLAGVETTQYVPMGRFAEIGEPLGWIINTAKSSVSRKREGVSFLSRSVRESQNYREELTCLRMLLYPEYEVKSGDISALRAKSIMVDAGPHSQYLFDIFIYLKEKYGIAQELPFNLKVWDPLEYEACKTSAYELM

SEQ ID NO: 1028 - protein, 512 aa, Macrophomina phaseolina partitivirus 1
MATYLPATWDFDLRYMTEVKRLPDWRRGILRQTQNYDPFVDVALKSFDSELRTDIKGMTRSPGDDYDLANALLRYDKAPISLKFSDRRFMAAYSQAVSEVMSEFKLFNPVVPHWILDVDLVKSTSSGYPHFKRKGDIFDQIRQEGRFHLHHLKLYDLHRCPLLPCSPSTRGGLSEVDNPKTRLVWMYPAAMTACEAVFAQPLIDALYSEKRDLFLTGVDSKFRIQRFLSLLDGEEGHFGVGLDFKAFDTFRSTQLIYDAFAVLKQNIKFGYYYDKVTGLQQGRSGVAARAEKAFDNIVEYFIHTPIVLPNGRIVTKHHGVPSGSHFTNLIDSIVNRILLKTFGFYEKIPIRNLRTNGDDSAFTVTDTYVTDIIQKASVFFDNFYRMTVSVDKSVVASAPSQMHVSGTVWTHQRPTRSTREWFMLAAYSDTYIAEPIDSFQRLLGLGIAGAFGDARYCSFFDYFQRGYDCRHGPNLLNWKKLRWLEHAFNITDLPMVYKQGAKSTLRLRLLVA

SEQ ID NO: 1029 - protein, 542 aa, Macrophomina phaseolina partitivirus 2
MDNQLLENVVVTETDLAQRGFEDGLLDPTLFSAPSRETRRKQSRAEFISTEGLSEVARWAGYQQYQPPGNVDPWVSEAMKQYDRSKYDDLKGYTRRGEALPGMYKSLKKYEGTVARFTDFSERQRQAMVRAIGKARSAFRTPEKMQPYRPHQVGQHIKTDTSAGFTFPGLRKKDCMEEIYQEARWLAHRIKSGGRRRFDPRRVRFAPCLAGSRGHLSPRDDVKTRLVWVYPAEMLVVEGLFAPIIYNGLATLPNGPLMLGKSSQRLFSEWLANYKEGEILHGLDFSAFDTHVPPWLIHVAFDILKQNIDFEYDGNVPNTKKGQIKLSNLWNAVVWYFINTPILMPDGRMFRKRHGVPSGSYFTQLIDSVVSYILISYVCDLQGLEPRNLKVLGDDSQFRSPFSLDLDRAQSDCDACAMNLSVVKCEQTKDPTQFKSLGLRYKNSHGYRDDDDWFKFAIYPEQPPPDLRTSMSRLVGLWLGGAMFSKAFVSFFEYYQSCYPVPSSGQFSKEQRRWMEIQRGGRAPLGWSVKTDLFWRSIFYTL

SEQ ID NO: 1030 - protein, 539 aa, Magnaporthe grisea partitivirus 1
MEDDSLDPTFHYVLAKGSHLIDALHLRPAKSGSTTSEDVLPPNYVNSNLSEIAKYGGYSTYMSNSNTDPHVRETLKLFSRQTYEDIRGYTRRPQGTPGMYTALAKFAGERNTFNDLSSSQKRSMRRAIAKAKKAFKLPYKREPLDWHEVGQFLRRDTAAGSTFMGAKKGDVMEEIYHEARWLGHRMKQDGKRSFDPTKMRFPPCLAGQRGGMSEIDDPKTRLVWIYPAEMLVVEGFYAPLMYRDFMNDPNSPMLNGKSAQRLYTEWCCKLREGETLYGIDFSSFDTKVPAWLIRVAFDILRQNIEWSTFQGKPVSKQDRQKWRNVWDAMVWYFINTPILMPDGRMFRKFRGVPSGSWWTQMIDSVVNFILIDYLADCQEVEIRNLKVLGDDSAFRSGNQFDLEVAKRDCEPTGMVIKPEKCERSEDPADFKLLGTKYRDGHVYREDDEWFKLALYPEGSVFTLDMSFTRLIGLWIGGAMFSRKFCAYMDFYQSSYPCPEEGWFSKDQKRWLEVIYSGKAPRGWTTKKSLFWRSIFYAYG

SEQ ID NO: 1031 - protein, 539 aa, Magnaporthe oryzae partitivirus 1
MEKTSPDLPFTKDVLTSADWDAVHRSLSYGNPGLTKIPADKWCYKYNVEQTRMNTDPFVRKAMKLWDETEYKQLYGYTKKASLEHGLNGLNKYGRPQRQKSHMPSEFKGSYHRALQEATRVFTPHEPLHRLSVPDVWDNMNLDSAAGFTFPGKKKSEVVEEAFDTASYMAHFISAGKHIYVPPAKLALRGHLSELEEIKTRPVWVFPFEVTILEGKWAIPYYRFLEEEVPSVHFGEGAMQRLAKILDSDIASHAEYAELTMDWSGFDTGVPNWMTDDALDILFGAFDETAVQHQDDLVVGGEYMAYKNEAVKDFLKTYFKKTKILLPDGSVYKKNHGIPSGSFFTQAIGSIINYIAVRTLDFYFGWNGRRFKVLGDDSSYLIPNGLGKVSVDAVSKAAWAAFGFTLKREKLRIATKQHERKFLGYQVSAYRYERPSDDWLKMALYPERDCEFLEQSASRVFAFYLLGGCNDATYCDFFHDYLNRYPVVYGSELPLTKGLKRLFKFVLRLNVERLVFLDLPNFDPLKGPFALSLGDKPFG

SEQ ID NO: 1032 - protein, 539 aa, Magnaporthe oryzae partitivirus 2
MEKTSPDLPFTKDVLTSVDWDAFHRSLSYGNPGLTKIPADKWCYKYNVEQTRMNTDPFVRKAMKLWDETEYKQLYGYTKKARLEHGLNGLKKYGRPQRQKSHMPSEFKESYHRALQEAKRVFTPHEPLHRLSVPDVCDNMNLDSAAGFTFPGKRKSEVVEEAFDTASYMAHFISAGKHIYVPPAKLALRGHLSELEEIKTRPVWVFPFEVTILEGKWAIPYYRFLEEEVPSVHFGEGAMQRLAKILVSDIASHSEYAELTMDWSGFDTGVPNWMTDDAFDILFGAFDETAVQHQDDLVVGGEYMAYKNEAVKDFLKTYFKKTKILLPDGSVYKKNHGIPSGSFFTQAIGSIINYIAVRTLDFYFGWNGRRFKVLGDDSSFLIPNGLGKVNVDAVSKAAWAAFGFTLKREKLRIATKQHERKFLGYQVSAYRYERPSDDWLKMALYPERDCEFLEQSASRVFAFYLLGGCNDATYCDFFHDYLNRYPVVYGRELPLTKGLKRLFKFVLRLNVERLVFPDLTNFDPLKVPFALSLGDKPFG

SEQ ID NO: 1033 - protein, 539 aa, Magnaporthe oryzae partitivirus 3
MEDDSLDPTFHYVLAKGSHLIDALHLRPAKPGSTTSEDVLPPNYVNSNLSEIAKYGGYSTYMSNSNTDPHVRETLKLFSRETYEDIRGYTRRPQGTPGMYTALAKFAGERNTFNDLSPSQKSSMRRAIAKATKAFKLPYKREPLDWHEVGQFLRRDTAAGSTFMGAKKGDVMEEIYHEARWLGHRMKQDGKRSFDPTKMRFPPCLAGQXGGMSEIDDPKTRLVWIYPAEMLXVEGFYAPLMYRDFMNDPNSPMLNGKSAQRLYTEWCCKLREGETLYGIDFSSFDTKVPAWLVRVAFDILRQNIEWSTFQGKPVSNKDRQKWRNVWDAMVWYFINTPILMPDGRMFRKYRGVPSGSWWTQMIDSVVNFILIDYLADCQEVEIRNLRVLGDDSAFRSNDQFDLEVAKRDCEPTGMVIKPEKCERSRDPADFKLLGTKYRDGHVYREDDEWFKLALYPEGSVFTLDMSFTRLIGLWIGGAMFSRKFCAYMDFYQSSYPCPEEGWFSKDQKRWLEVIYSGKAPRGWTTKKSLFWRSIFYAYG

SEQ ID NO: 1034 - protein, 589 aa, Maize associated partiti-like virus
RFTTWNSFVQLDLRFKNRCAWVLDRMVDHICGDGASTSSRSQVIIRLPRKEGFAFDLAPSREDPLARRAAEHVFGKSYVDGCFQRLHRSTLSYDALVSDIMGYERVHPRRRHSDPVYAMALESVRRDFSSTAKLIPHTMGAVPHLADFPRQKSAGLPYKNWPGYRSKGDVVDDPDELWKINTLWHHISARKAHKPLEDVCLFARSQVCSVEKQKIRGVWGYPIEVYLEEARFFYPLMDWLKSPECKFPLSYGLEMANGGMVAIADLAQRLGTDSKYLMIDWSKFDKSIPPWLIRDAFDIIADVIDFDHVRDSEGKVWPVRAYRSRRRWKKLIDYFIETPVRTCKGERFLVRGGVPSGSCFTNVIDSIINCVVSRYISYQTTGAFPLGELYLGDDGVCFFPRSSYLDLDNLAKVAFDCFGLVLNRDKSYVTSVVENIHFIGYHNAPHCAPNRDQDLLVVSFIHPERSRRTAEECAAAALGQLWANFDPRIAALWYRVVIFVSDAFCVTHDDIVVQLRRTAHRHKYLSHLGRHFPSLTIPSPNEWGHLLEVLPAPVPKRLLPIRRYEYGLLCAEGWKRLHTPVEVDVDSPE

SEQ ID NO: 1035 - protein, 481 aa, Marigold cryptic virus
MSVSTINISGYQFTSFRGDLEDLHQRHSETIGRQSETIYEDEFAKAELMDIAPQLYDQWIQGWARSYYSGTKHLEAIMQYATPNTPITRLNQLVWRQSVEAVRDGLRSLSPVRAFSVDTELKSVQYIQSSSAGYGYIGAKGEPEGENHRRAIARAKATLYSAIRTDGQGIEHAIKESVPDVGYTRTQLANIAETTKVRGVWGRAFHYILLEGTIAKPLLDSFMTSDTFVMIGRDPTTSVPRLLSSIKTGDGWISSIDWSQFDSTVSRFEIEAAFSLLKEKVYFPDLETEMCFEFCKLLFIHKKIAAPDGKIYWSHKGIPSGSYFTTLIGSIVNRLRIEYLWRIKYNEGPESCYVLGDDSLIYYDRYYDPSEIAREASNLNWYMNPDKTECSTIPSGITFLGRTVKGGMNQRDLKRCLRLLILPEYPVEDGSISAYRAESIAEDAGGTGGILNDIAKRLKRIYGVASEEEVPIRLRRYNFNL

SEQ ID NO: 1036 - protein, 477 aa, Melon partitivirus; identical to SEQ ID NO: 609

SEQ ID NO: 1037 - protein, 573 aa, Metarhizium brunneum partitivirus 1
MGLKYLRRVSRFPSRASQHMDEYATRALNNVASADVREFIAQTAKAWHRPSGDVSLVEDSLLKYDTRPSKRCTTGDYLAILKKTLDELRPDEPIIPLTLGAAAKHPDFPRTTSPGFPWIHQGFSSKSDVLQDKGGSGLIHRAWDSIGRGIPWSLPDSLAYHRVVASPVDKTKVRPVWGYPVDVVLEEARFFLPMITFLKGKCNKDDTFYGLGLETALSGHSHLLRCFSENHIKLSMSADLSNFDAQVPSWIIRDVFSHMSSWFDFTKVQDSEGKIWNVKDEQTCRRWRAMVSYFVNTKIRTPSGLRVQKSSGVPSGSMFTNVIDTLVNAVQMRTAIRRVTGYLPAKDYYYGDDSEVFFDCQGIDLDALASELLDTFGAILSVEKTILTDNPDNIHWLGYYCREGSPRRPLDFIIASTLYPEREVVSPLDSCARMVGQMYSVMDPKSSVLFYDAVRHLLLEYHIDDATLETYLRTLPSKAFKYLATLGLDMSEISLPICHPDPFGSRYIPAVLPRPSPRNYTKIRDRVLPDYAFVAEAYANRSLRSRSFTDFDKYIETFSFYNEFELDEAYFSA

SEQ ID NO: 1038 - protein, 538 aa, Metarhizium majus partitivirus 1
MMESFDSPPGPSQARAPSVNWEQFHASIKGSPGLRQLKPNKWNYKYNVEQTRMNTDPFVRKSMKYWNPNKYEELYGKTKRAELIQGLESFKNFSRWQRHKPTSPEFKSAYSRALNATRRVFTPHEPLHRYSVPDVCDKMNLDSAAGYSFPMKKKSECIEELYDTASYLAHFISHGKDVFIPPCKLALRGHLSDIDEGKTRSVWVYPGELSILEGKWALPYYKFLEEEVPSVHFGEGAMQRLAKMLVGGLATHDECVEVTLDWSSFDSTVPNWMIDDAFDILFDSFDEQYTLHQGDLVFGGQHMEDKNVAVREFLKTYFKKTKIMLPDGTVYAKQHGIPSGSFFTQAIGSIVNYIAIRTIDFHSGWNARRFRVLGDDSSFLIPYGKSRITADAVADYAWFNFGMVLKREKLRIAEKQHERKFLGYQVSAYRYERPSEDWLSMVLYPERDVEFLEQSASRVFAYYLLGGCNDEIYCSFFRDYIRRYPILYGRQLPLTHGLKRLFRFVLRLPLDMLQFPDFSKLNTLKVPFALSCGDRPFD

SEQ ID NO: 1039 - protein, 620 aa, Mischke partiti-like virus
MKRSNYVIEEIIRVMNEIDSRAQNLKKPQHVEDLARGFEVSQKAMSQEEIVQMTPLMKNALEIFGDKPVGDENWKLTVNMPLTKAEKWFDEAIRILLTKFNGPERQYNDNLDLLDKDHYDVQCWSNRHENFRQIQPGQAEERLEATREYTRATKRIGLIQKLRSDPVLQKAVLLVFNQLPEVKASNQFLEINLPFMTKHSNVGYKWWANDRNLVEGTNETYAQMTLKLSEKLSEKDLDNWNISTGYGRNQRKGRLIIAVSRVLNLWLNRLEAVEIAAYKRKSSLFLGYNDDVALKEGLTRMVNYAKQHGLKMRNNDQSRFDRHVSYEWLLLMNAISVIKAQGSLSKQIAMKRAVLSTKTWFVNGLTGKLEEFYGRIFSGFIDTNRGGGIINALVTTYCVMKQDPKYAEHVYNADYYMLVMGDDNNFLYQNLDHKQFEKDMESLGFKVNMDKDEYGPMFLQYRLFQDHDTLVMAYAWVRVVYSMLMKEEGKGLGPAGWYIAWLQQMSKCIEFQPAFKILVNLLIPFDDNHFFTDKSIKEIVAMMNEEDRAKEAEAKTGAQKRRYQSTLDKLRDGDPLKSRLVESIEKGGEGYLADLHEAVKKAVDPNFLKDAGLKVPARKR

SEQ ID NO: 1040 - protein, 604 aa, Monilinia partitivirus A
MNLNYIKTLLGNHSLTRDKGDLSSLAEWRLDYVYRSALKFFSKEEVDQAASNRRSNTSDDAVIDDFMSFEQPVHPIPRDDNYLLALQVVKDTFHPGKLLYPVSFPDLRYYPWNIKPNAEAPWNTETFKFKPTFRNLDDESESPKLREHIEKLSFWISDKHIRVVDYLRLKQRFGITNSSFHSFHNLYNEIFSYNRSLVHFIKDGLTPFWQNGIPIPYYWSTLHARAHVVASDEPDKIRAVFGAPKLLLMVENMFIWPLQATYLNNDDKGRLLWGRETIKGGWKKLYNEINSKILPNTVLSLDWSQFDKRLLFELIDDVHIIWRSYFDFNMYQPTSFYPTASTTLERIERLWTWMCHSIKYTPILLPDGRLYNWTRNGFGSGYQQTQLMDSFANAIMILTCLKAMGINIESKHFWIRVQGDDSLIAFQEMTVQIFGPSALTSLASAAKYYFNAILSEKKSQISDSTENISVLSFFNSYGLPYRKDEDLLRHLMFPETPGTKDQLLAASIGLAYSACGCSPRFHNLCDYIVTRLMSEDRTPDLNALNWMIRAGIFEPEETAAMLQSPLPSCIDLRASVWSHTPRSYLSKERLWPTEPGTRGRFFFL

SEQ ID NO: 1041 - protein, 475 aa, Morus alba cryptic virus
MLNNTGYEFTDFVQDLEETGKRHTHVVRRDPEVTYEDPYASRELRSRYPRLYENVIHGWSRSYYSGAEHMKAILQYATPNTTYERVNQPAYEQAKANVLESLRSLPTVRAFNVKDELDLVSFESSSAAGYDYIGVKGPQDGENHDRAIKRAKATLWSAIIPGDEGIEHVLRTYVPDVGYTRTQLTDLREKMKVRGVWGRAFHYILLEGVIAQPLLEAFKRSRTFFHIGSDPTVSVPFILSDTASKSLWLTAIDWKAFDATVSRFEINAAFDLIKSIVQFPNQETEQTLELCRQLFTHKMLAAPDGNIYWIHKGIPSGSYFTSTVGSIINRLRIEYMWLLHFGRSPKVCYTQGDDSLIGDDQLFSPMDMAYIAEPLNWIINPTKTVTSKMLEMVTFLGRTSLGGLNQRDLKRCLRLLILPEYPVTTGAISAFRARSIAYDSDTTSQILDELARALRKKYGIAREEEVPRQLRPWKA

SEQ ID NO: 1042 - protein, 468 aa, Mycosphaerella partitivirus A
MALRFLKKVPKFSKINAMHVDTFARSSLLQVASPSGRKKILQVEKEWHRPQGDDRVLDDNLMEYGKRLPSRCLSGDYLAILRETMEELRPNELVVPTTLGAAEKNPQLPKTTSPGFPWIHKGYKTKQDVLDDQFAVGSIHGAWRAIGDGKSWSLPDSMAFHRVVASTKDRSKIRPVWGYPIDVLLEEARFFYPLFDELKVVSNERDTFYGIGLETGLSGHRHLCRHMLSAGVKLALCSDISSFDAHVPAWLIRDVFSHMSSWFDFHHVRDSEGKIWPVDAAKTARRWRAMVSYFINTKIRTPSGLRFQKFQGVPSGSCFTNLMDTLCNAVMMRVALRRVTGNLPVKDYYMGDDSAVFINCSISLPDLATELDTTFGSELSLRKTILTDNTDNIHWLGYYHRETGPQRDLDFIIASTLFPEREVEGPLDATARLLGQMYSTMHPIWSVTFFDAVQHLRKLYSISEQDII

SEQ ID NO: 1043 - protein, 755 aa, Neurospora crassa partitivirus 1
MHSLFTIVNFYILLRFQQRRRRKETTPNLIFPIRNILFEWEHRRSIPRDPSVPFRYFDYSKSLLSYIDLMICHKIKIHIDDNIQAIETRYELRNEPFDLYYYVPDEDLPPERQPASGIRYTGRRYHEIPSGTLNINETEHIISDDPDFIETPEFRSGILYDETIDLSGAPPVPEIVQIIHDWFPHYEQYINVFCRPPSFGPQAFRDFNRPTPNPPRPTPERHEAIMNVVRAKFNIKPYRPLHFVDAIAAETPLNTSASYYSKFDPQTRVLARYSAPTRYRDMPTSKGYNFNVTMNLFRTEYHHIKYDCFPFPTDNHDPEANASILDTWFAKHPSQLFIRTQISKRDPNDPKKIRPVYSVDDRFLHIEKTLVTPALAQLRNPQCCVAHGLETFRGAMCLLDRTALFYESFISLDWSQFDQRLPSYAITAFFLDYIPSLLIVSHGYFPSRGYESTQQDIHSFASKIYNIVVFLTTWYLNMSYLSYDGFAYIRDHGGVPSGLLNTQFLDSFGNMYIIVDCLLEFGFTQAECLDMLYCVLGDDNLIFLRQRFQRVVEFMSFLSSYAEQRHGMVVSILKSVYTSLRTKITFLSYENNYGMPIRPIGKLVAQLTMPERPIPHGRQWIHSARALGLAYANCGQDVNFHLLCKMVYDKFRPDVPVSSLHVAKVFKKWKYQLPEFDIESVTYTFPDFPTLFEIRQLVSDYHGFFSETDKWNFNLFEAPPSDNLHEYVTLKEYVQTNEHMSSTIRAFMQGKRSFL

SEQ ID NO: 1044 - protein, 755 aa, Neurospora discreta partitivirus 1
MHSLFTIVNFYILLRFQQRRRRKETTSHLIFPIRNILFEWEHRRSIPRDLSVPFRYFDYSKSLLSYIDLMICHKIKIHIDDNTQAIETRYELRNEPFDLYYYVPDEDLPPERQPASGIRYTGRRYHEIPSGTLNINETEHIISDDPDFIETPEFRSGILHDETIDLSGAPPVPEIVQIIHDWFPHYEQYINVFCRPPSFGPQAFRDFNRPTPNPPPPTPERHEAIMTVIRAKFNIKPYRPLHFVDAIAAETPLNTSASYYSKFDPQTRVLAHYSAPTRYRDMPTSKGYNFNVTMNLFRTEYHHIKYDCFPFPTDNHDLEANTSILDTWFAKHPSQLFIRTQISKRDPNDPKKIRPVYSVDDRFLHIEKTLVTPALAQLRNPQCCVAHGLETFRGAMCLLDRTALFYESFISLDWSQFDQRLPPYAITAFFLDYIPSLLIVSHGYFPSRGYESTQQDIHLFASKIYNIVVFLTTWYFNMSYLSFDGFAYIRDHGGVPSGLLNTQFLDSFGNMYIITDCLLEFGFTQAECLDMLYCVLGDDNLIFLRQRFQRVIQFMSFLSSYAEQRHGMVVSILKSVYTSLRTKITFLSYENNYGMPIRPIGKLVAQLTMPERPIPHGRQWIHSARALGLAYANCGQDANFHLLCKMVYDKFRPDVPVSSLHVAKVFKKWKYQLPEFDIESVTYTFPDFPTLFEIRQLVSNYHGFLSETDKWNFNLFEAPPSDNLHEYVTLKEYVQTNEYMSSTIRAFMQGKRSFL

SEQ ID NO: 1045 - protein, 754 aa, Neurospora discreta partitivirus 2
MLAISTIVTLNVLLRFQQRRRRKETAPNLTFPIRNILYEWETRRSIPRSTEPFPIFDYSKSLLAYIDLITCHKIKIHLNDESNVIRDRYQAREEPFDVYADIDLTDIPEERYSAPGITTAPRRYHQIPSGSLNINEQIHVIQSDSDFTEDRDHRSNTLFDESIDLSGNPPHPVIEQLIHDWFPQYIRYLDDYCRPPSFGPQAFIDFNRETPSPPPPSPERHEAIMRIVRSKMNIKPYRPLHFADALAAETPLNTSASYYSKYDPRMRVLARYSSPQRYRDMPTSKGHFINVTLNEFRLEFHHIKYDGVPFPHNHDSLDELNQRNELWMSKHPTQLFIRTQISKRDPTEPKKIRPVYAVDDRFLHIEKTLTVPLLAQLRNPQCCVAHGLETFRGAMTLLDNIALYFDSYVSLDWSQYDQRLPYYVIVAFFLDFLASLIIVSHGYMPTRSYPDTTTQEFHSFARRQFNVLKYLLVWYERMTFLSFDGFAYVREHGGVPSGLLNTQSLDSFGNMYIISDCLLEFGFTEPECTDMLFCVLGDDNLIFLRHNLSRVSEFMIFLDHYAKDRHGMVLSILKSMYSNLRSKITFLGYENNYGYPTRPIGKLVAQLAFPERPVPDNRQWIHAARALGLAYASCGQDPVFHLLCKMVYDKFRPSTSVPSLHIQKIFKKWKYQLPDFDIEDVEYTFPDFPTSNAIKHIVYGYHGTFSETDKWNFNVFDVPPSDNLQDYIVLKDYVLQHPELAQQTNEYWHGKRSL

SEQ ID NO: 1046 - protein, 745 aa, Neurospora discreta partitivirus 3
MKLHVPFTSVRDYLAERMIRIKREWQLYQKHDHAPDAIVEEIQDSDTRRMYANAYVPREKKELFKIYESEYQQIVESLRIDYQAREQPFELRRPRSPSVSIPENRLPQPGLKLIPHEYHSGHIIHENPTTSRPLNSDEETDAPKSYLTGDIDFGPDIDPLLRSLIVQKYPQYLPYINKFCRPAGTTNGTFRDFNKEQVPTAPIDPDRKEHVLKHVLHFLDATPYLPLHFVDTQFDKRPLITGTGYHNRFSYAARAHSRFSHPPDYADKPTSRGYFYNATYENARTLIHKIKETGMPFNLAFAPEDDDLTDDQIIDYVLHCENFFLDYPTLLFTRNHISDREKSLKVRPVYAVDDLFLLIESMLTFPLLVQARKPSCSIMYGLETIRGSNCYLDKLALSYETFFTIDWSSFDQRVPRSLTDLYYTDFLRRLIVINHGYAPTYEYPTYPDLTEHSMYKKMDNLLHFLHLWYNNMAFLSIDGYAYWRLYAGVPSGLFNTQYLDSFVNLYILTDALIEFGFTDEEIRDLVLFVLGDDNSGFTHIPFERLTSFVSFLEKYALRRYNMVLSKTKSVLTTLRSKIESLGYQCNFGRPKRDIAKLVAQLCYPEHRMNYKTMSARAIGIAYASCGNDPTFHSFCYDVFCMFLPFYEHDARSDLQLARKLQLTDPDQLNFETKHLQFPTIDMIRKCFDHYQGPLQYAPKWNYAHFINGPDVVPPSAKTMHDYEIEHNLEARQAPTFRQADLLPLV

SEQ ID NO: 1047 - protein, 701 aa, Neurospora discreta partitivirus 4
MLNQIRDYFHERLSRLLWDHKIFQKNSGNPEITLDRHQDSDIERIYKSFHYDFSNSDKNTDYEAQYQAINHILETKQANQGFASEFYRFRDTPVPDNRIPPSGIDLLPYEYKSINIVTATPEVPETGFQIHPRIERLVRSRYPQYLTYVRKFVRPLGTTDATVTDFFKPQTPSKPVEPERLQRILSHIMKKMAATPYLPLHFVDTQYDKRPLSSGTGYYHRRSHAANIHAMFSHPREYENRPTSKGYFINAFLESARSLVHWIKQTSVPFRNLPNDLPHALRTFFLQRPTMLFTRNHISDRTGTLKQRPVYAVDDLFLTIESMLTFPAHVIARKPECCIMYGLETIRGANRALDRIAQSYSSYFTIDWSGFDQRAPWCIIRTFFSEYLPRLIVINHGYAPTYEYPSYPDLTSDKMAQRVINLLSFLATWYFNMVFTTADGYAYVRRHAGVPSGLLNTQYLDSYVNLFSIIDGLIEFNCTDDEIDEILLFIMGDDNSGFTLWSISRLESFIGFFEHYALNRYGMVLSKTKSVITTLRHKIQTLSYECNFGMPTRPIGKLVAQLCYPERGPRPKYMSARAVGMAWASCGQDKTFHDFCRDVFYEFHDDAATIDEETYRQVQAHLPGYLRVDETVRQIVNLQVFPSLEHVRKTLSTWKGPLSYQPKWDLAHFVNQPDVVPPDSVTLHEYMISHNLEVTILHNLF

SEQ ID NO: 1048 - protein, 466 aa, Newman partiti-like virus
ADMLRSQGFSFEETPRSVYKVEKLYASLAGYAPNTIQAPQQSTEYEAGVALAYSCFARPKDHEVLHVLEMNPETLMMITSNPSGSAGLTNYGCSKQESQTRALERGLQTLKGEKQPEPCLGFARTQFDDKTRLVWGYPYSMTFIEGLVAWSLIQLFKGGSTPMAFAMSSMALGTKMEVSSYHKEWAYSLDMSQFDATISAALIHRAFNILRTWYDMDEVEPVSGVTVKKIFDLIEKYFIHTTIVMPDGCIYIGKDHGVPSGSFFTQIVDSIVNVIITGAIACHFSLHVSRKDIYVLGDDILFWSNRKVDLDDIADYANRTFHVKLHGSEKSAIYHYDEAIHYLGRDWSNGLPTLDQDAIVARMVYPERFRRYSTEVKKKEREVRMLILSYAATYRAGWRIASSLLGADRTWHHQGCANVDVNTYCEGSGRDDFDFDMLSGLTRYRRKYHFGHVKGDIPITATQYWL

SEQ ID NO: 1049 - protein, 538 aa, Nigrospora oryzae partitivirus 1
MEIAQEPTNHIIETEGSHLVDALHLRPAKTRSTTSEDVLPTNYSDPNLREIAKYGGYSTYSSNSNTDPYVRESLKLFDRQLYEDVRGFTRRPQGTPGMYTSLAKFGGEKCGFDSLSASQQSSMRRSIAKAKRAFKLPYQRDPLDWHEVGQFLRRDTSAGSTFMGSKKGDVMEEIYHEARWLGHRMKQDGKGSFNPSKMRFPPCLAGQRGGMSERDDPKTRLVWIYPAEMLVIEGFYAPLMYQDFMNDPNSPMLNGKSSQRLYTEWCCGLREGETLYGIDFSSFDTKVPAWLIRVAFDILRQNINFDTWQGKPVSKKDKQKWRNVWDGMIWYFINTPMLMPDGRMFRKYRGVPSGSWWTQMIDSVCNYILIDYFADCQNVEIRNLKVLGDDSAFRSNDQFDLDVASKDAEPTGMIIKPEKCDKTKDPANFKLLGTHYRGGHAHRDDIEWFKLVLYPESSVLTLDVSFTRLVGLWLGGAMWSRRFIAYMDYFQTCYPVPEEGWFSKDQKRWLEIVYSGKAPRGWTTKRSLFWRSIFYTYG

SEQ ID NO: 1050 - protein, 538 aa, Nigrospora sphaerica partitivirus 1
MEKATPDRPDPRGMRDSVDWDAFHKDCESLPGLKRLYPDRWTYKYNIEETRMNTDPFVRKSMKLWDQETYESLRGYTKKASLGLGLESFKMFGRHEFSKSRMPSEFKECYQKALADAKRVFTPHERLYRVSVPDVCDKMNLDSAAGFSYPSKKKSEVIEEVFDTASYMAHFIASGKHVYVPPAKIALRGHLSEVEEQKVRPVWVFPAEVTVLEGKWAIPYYKFLEEEVPTVHFGEGAMQRLAKILVSGLANESECTEVTLDWSGFDGNVPNFMIDDAFDIIFNSFDETAVHHQGNLVFGGDHMASKQYPIQDWLRTYFKKTKIMLPDGSVYKKFHGVPSGSFFTQVVDSIVNYISVMMLSYYFGWNAQRVRVLGDDSSFLIPNGAGKVTAEAVSAAAWSSLGFVLKVKKLRIAQKQSDRKFLGYQVQAYRYERPTEEWLRMVMYPERDVEFLEQSASRVFAFYLLGGCNDAVYCDFFRDYIARYPVVYGKELPLTRGLKRLFKFVFRIQLDNLVFPDLSRIDLMKVPFALSMGDSPFS

SEQ ID NO: 1051 - protein, 498 aa, Norway partiti-like virus 1
MTNMPVYRRMERDRPTKNSLVYITKVEGHTIQKDPQIVDPFVRRALIALLDKDPVEEFSEFTRSFYTEEGHYLNLWKYDRKITPRPSDPDIDLALELTRKAFAPTEPILSIGWDSLGEVPYIPTSSAGWKYKGPKGAPGNHELAISRAVGSLYAWLDSQRPDRDNYPRFRYTPDLAFTRTQLMTMDSPKIRHVWGKAFHNIILEGMSASPLIHYYSRIGQPIVVGVHLYKKLPYLIRTCLWDGEHRRIGVGLDMTSFDTCPMPWLINAIFDMIESYLTFPDEMSHHAFRYTRKFFIDTPVIMPDGRMWLKKLGVPSGSYYTQLVDSMINYTVIMYLQTKMYNQQFTTWVLGDDSLFGIPDELGFPDLDEAARIVKRIGFELSTRKCIVATHPGSLEFLGHVSRGASVDREWSKMILLALFPEREVTDPGQSLARVFGLLVDSALNNTPLITLAHAMEALYSYPEMTSLAREDSNWLRAVVGVEKIPPHVDLVKVWTLT

SEQ ID NO: 1052 - protein, 302 aa, Nyamuk partiti-like virus
RVIIRDDEFGYVVRAAWDKFSVTPVNPIHLNDIFDMDLDIRKSSPGLPWQPQYKTRGEVMDCPDARTSIRRYWHRIKAGEDLTPDDCKVLYRAHIQRDEPKIRAVYGYPTAITLMEACFALPLIDEYKKGKTPLAYGYDMAVGGAYKLRSRIKKYRYFGCIDFSSFDKTVSAQLIKIAFSILEQNVDIRRYQKHGIPDASRLYRAWDYLVKYFLETPLRLCNGERWKKKAGVPSGSYFTQLVDSIVNWILINYAFLKRFGRMPEDCLVFGDDSVVSSNSHFSLEEISGQLSEAGMTVNVDKS

SEQ ID NO: 1053 - protein, 132 aa, Ophiostoma quercus partitivirus
EPIPYEFTYLHSRSHMVQSDKPDKIRAVFGVPKLLLMVENMFIWNIQKDYLNGPLGKSPLLWGFETIRGGWMKLISQLTSKPLSSIISADWSGFDHKALHEVIDDVHDIWKSWFDFNQGYEPSLSNTHDYTA

SEQ ID NO: 1054 - protein, 447 aa, Palmetto partiti-like virus
IKLNLNSDLRAVENFSPNVPRPSPYAQALFGEKFSTARRSELRFSLIKNDMLKMGSNPTIIRDDEFGYVVRAAWDKFSVTPVNPIHLNDIFDMDLDIRKSSPGLPWQPQYKTRGEVMDCPDARTSIRRYWHRIKAGEDLTPDDCKVLYRAHIQRDEPKIRAVYGYPTAITLMEACFALPLIDEYKKGKTPLAYGYDMAVGGAYKLRSRIKKYRYFGCIDFSSFDKTVSAQLIKIAFSILEQNVDIRRYQKHGIPDASRLYRAWDYLVKYFLETPLRLCNGERWKKKAGVPSGSYFTQLVDSIVNWILINYAFLKRFGRMPEDCLVFGDDSVVSSNSHFSLEEISGQLSEAGMTVNVDKSIYTTCVDEVEFLGFRIEGGFPCRSLERWMEALYHPEWPDEDWDMFASRALGLFYANAGVNGQFSQICRNIVGVRAFTINLPRRWFSLS

SEQ ID NO: 1055 - protein, 477 aa, Panax cryptic virus 1
MVRGTLVGYDFLNFDLELEKTDQQHPHIVRREHAVTYVDQYAFEHVEDMSRLAEEQVLTGWSRSYYVPEKHLEALLKYNLPNIPVSRIRVDIYRQSINEAKNRLRSLQTVRAFDVLTEIDQVSYKLSSAAGYDYVGEKGPIGGDNHKRAIARAKAILWSAIADDGEGIEHVIETSVPDVGYTRTQLADLNEKTKVRQVWGRAFHYILLEGLVAGPLTKAVMNTDTFIHAGKDPTQSVPNLLSDIARDCKWKYALDWRQFDATVSRFEIHAAFDIIKQYISFPNYETEQAFEITRQLFIHKKVAAPDGFIYRSHKGIPSGSYYTSIIGSIVNYLRIDYLWRVLSGHTPIHIYTLGDDSLVGDNILLQPEKLAEVANNIGWHFNPEKTEYSTVPEEVTFLGRTYLGGLNKRDLTKCLRLLVYPEYPVESGRISAYRARSIAEDAGSLSDLLNRVADRLRRKYGIASDDEVPDYFKRYVF

SEQ ID NO: 1056 - protein, 477 aa, Panax cryptic virus 2
MALLNITGYDFTDYSSELEDLQQRHIHVVRREPNITYQDEFALGELLIDNYRLYEQELVGWSRSYYSGEEHMKAIFNYSSPNTPITNIDVNLYKQAMANVREWLSSLPTVRAFNVLTELNQVRYEPSSAAGYDYTGAKGLIDGINHDRAIRRAKAVLWSAIAPDGEGIEHVIRTSVPDVGYTRTQLTNLEEKTKVRSVWGRAFHYILLEGTCAQPLLDAFKIGETFFHVGSDPTVSVPQILSHIAGNCNWLYALDWSSFDATVSRFEINTAFDIIKHKIEFCNFETEQCFEICRQLFIHKKIAAPDGKIYWSHKGIPSGSYYTSIIGSIINRLRIEYIWLSIKGRGPKMCYTQGDDSICGDDERVKSEDFADIANNIGWLINPAKTETSRYPEFVTFLGRTSYGGLNHRNLIRCLRLLIFPEYPVPNGAISAYRAQAIATDAGNTSQILNAISRRLRLRYGVASHDEVPKELRLYKV

SEQ ID NO: 1057 - protein, 360 aa, Panax cryptic virus 4
MIDRRMTKRNLYNEMFLINRKNIHLIKDGHKTNDFGHDLRYWHTAFARQHLVYKDDPDKVRLVFGAPSTLLMAELMFIWPIQVSLLTRGPESPMLWGYETLTGGWSRLHSWAAHALPRFESVVTLDWSRFDKDARHSVIKDIHSLVMRPMFDFNRGYHPTKPYPDTTSTDPIRLENLWNWMADAILTTPLILPDGQVLRFTHSGIYSGYFQTQILDSMYNCVMIFTILSKMGFDLNNIAIKVQGDDSIFLLHQHYITIKETFLPFFTTYAQQYFGSSVNQKKSEILPSLEGAEVLKYRNHGTMPKRDELQLLAMLRHPERTSSLPSLMARSIGIAYANCGNYTRVYQICEDIYKYLALGG

SEQ ID NO: 1058 - protein, 579 aa, Partiti-like adriusvirus
MAKFSSINPPKLQKRSRLLVKDSDRWDNRDMSYFPIEYDDFKVRNSSDFYFAQKCQRSSVNYSRFVQDVISKWVSLFEEVSAIDCYKHVPFMDKKPFLNRVNPPQPENVVREYIIREYPEYSWLPDKLDTSDFRKQDRSTAINFIKPWGMSQYIDVDNFLHALSDMFSLVGLPMDYRNKSFEEFTEGMNNRSSSGFPLFVKKGSDAAIDECREYIHRLTNGELDAVEGLFSLPTVLFHRFTPKVNSKTKTVKVKSRAVFGYPMSIIGISEMLYGDLIDKILSASPFLLGKTRVELSNITLEMRRSAMYESCGILSLDINQMDQKLSYSLQLLTHAIIYCCNCEYSKYPNLDQNGIETALAAYEIHGPTFGNWGTMMLNNGGTKSGTRWNTLTNSLSLLLASRLFTRERNGSKFVELEKGIGDDQIKKVRMRNPLDEVEKKFIIRKATECYRQLALKLHPDKCKVCSFMDDLPVMGMDWDIQGRPNRPRDWVVSKLAYPERYRRQKFDERFVIRSASILFQIHRGLEYFEKLVVPRVGWLAHAVINKRDPTLTYYHSRDGPINETRLPLSALVNKGWRLF

SEQ ID NO: 1059 - protein, 609 aa, Partiti-like alassinovirus
MKVKGYNNVIYFGNTVKIMMLNKDTLYRSKMYKAWLRNIRLEGCKIQGAHVRREGTEFMCYDKMLNLINPSNQSLDHLLSPNLRRFRKYFSYIVKLLRSQAGDLGRFKYSEVIFQPWLKTRLLSIRLPAVEHSMLAGVENMFGYLRGRLPWKLWVTHQDILDADVANVNAHCDNKNAKIEWHNLNSLHFFCAVGATILGFRLDGISQHYRMLRPWEALDNLPHDTSSGYPLFKRKDSPEAVSDAIGWIKSFEEMRSFSSKFSSLIMNPVVIFHRFTTKIRDLRGSANIRPDIKIRQVFGVSFRVMLLETMLFQKVIDFVSSEGKFHSIGKTRPEISAQVSLIRRNAFIGHRAVFCGDISGMDKNLPLFLVVCFFASLLAVVPFSGFAVVSVAAVAVYHCLTPILTFSGLYVTNGGNVTGSKLTSLLNTFCLSVVVNYFFFKVWGRSVREGEFFVQGDDFVVVLPRGFVYHLARVFGYFNLSINLRKSKYVTEIGGDLIDYLGFGWHPNGYTDNADKWWIAKVIYPERYVDDASGFFGRSFIRFCSIIFQLKRGPEIFDQFFEANPVLKKQLDVYLKAGDPIIYHMDKRGKTHLGRIPLSQLRLRNWTCY

SEQ ID NO: 1060 - protein, 568 aa, Partiti-like lacotivirus
MRWDHLDIRINHLRIRKLFSKWLTDKVDYRSKIDHGTLFASGFEFLFDNQVLDKENRAFVKTFRMLHAKLYSTVKNVAGLRSIEINFPIALKTRLSAISFGGIETRLKGCFEKAFPQYQNRLPERTVISRQQVLDSDKDTLTVYAKFKTVNVKYPKLLLRAIISVVNQWDADNLSKYTLPVQSCLDALPSDTSSCYPVFAKKNSEEAISQLYDDLNTVEKIAKSQGIFEFFVRNPCVIFHRFSNSLKESFGRRNLETKIRQIFGYPFLVLVIETMIFSNLVDCIVAKTTYMISGYRRTDIAHRVKRVRANASATDRSVFCLDISGMDKNLASFWIIAFFTSMFNLISPQGRIREYFFAIMSYQIFTPILSLSFGVIFTDGGNVSGSKLTSILNSFVVSSALVYCYLVYYGRLPTTDELSGYGDDWVVVIDAELSQKFINSLAELGLAVSATKSSVCDPDLDNIKLLGFYWDLEHSPTNTLDWVIAKTVYPERYVDEKGIGRVFLRLASVIFQIKDGPMLFNNVVRQDPQMLEMSYDSTVKIEFLDKRKRTHLGSVPLGLLRERGWTCY

SEQ ID NO: 1061 - protein, 460 aa, Partitivirus-like 1
MHRSTISYEAMLQDLFAYDREPTVCNRDDVYFAVLNSIRQDLESFPTIVPLTMGAVPQRPDFPGQKSPGLPYKLQGFRTKQEVIDAGLLHEINRDWQSIGFKKRRVDLPDVCLFARAQIARRGREKIRATWGYPLSVYLEEGRFFYPIHDAIKARHHNFPIAYGYEMANGGMEVINELLGRNPDSKYLCVDWKQFDKTVPPWVIRDAFSLLAEKIDWGHVRDVEGKIWPVNPVPSKRRWKCMVDYFINTPIRTCKGERFLVSQGVPSGSCFTNLIDSLINALYVRYTIYQTTSSLPVDEMYLGDDGVVVVNGIINLENMAEVALEKFGAILNIEKSYITTRKDNVHFLGYFNKAGFPFKNQDFLIASFIQPEHTRKDALDACAAGLGQLWSGFDAVYARVWHRVILDIAAMDGIAKDEVVFHLRATAHRHKYLMHIGLDPRTLSLPVPNENGLILDVQLK

SEQ ID NO: 1062 - protein, 563 aa, Partitivirus-like 2
KMSSADSNPIKSLPSAEGYPLDLRPPRWDSIAVKYSNLIFGSRVVSGVLKKYHRSRVSMDALQDDVFEYNCKLPSRPNDDPIYIAALQSVRREFVPQIPIIPLTIGAASKVSTVPKDKSPGLPWKLMGFKTKEDVFADDDAMRQIRKDWILIGRGYHVRLPDCLVYARAQICDPSTNKVRATWGYPTGVFIEEARFVYPYLDFLKNRRDDYPLAYGVEIGKGGMGYVDEMFHRAGSGVKAVMMDWRRFDKQIPAWLVRDAFALLKECFRTDVVVDVEGKVWPVNSHITNARWSKMVQYFINTPFRMPDGSRYMKSHGVPSGSCFTNIIDSIINAVVTRYCVYQTTGSFPEYDLYMGDDSVFVTRGVVNLDDIASVAEETFGFTLNVKKSYVTSERTNVQFLGYYNDSGYPIRDQDFLIASFCLPERVQEPDPVFTATRAVGQMWSTLNGIAAQKWLLIIQGIENEYALSPQWFVDHMAECPNSLKFLRLHGLDANSFPQPGNFDVVDAPMRPPFRPFRRNPVRRVTDVKDLYYQYLDDPIRVDDWIGLERDDIPPDIEDDVLC

SEQ ID NO: 1063 - protein, 541 aa, Partitivirus-like 3
MRPPRWDSIAVKYSNLIFGSRVVSGVLKKYHRSRVSMDALQDDVFEYNCKLPSRPNDDPIYIAALQSVRREFVPQIPIIPLTIGAASKVSTVPKDKSPGLPWKLMGFKTKEDVFADDDAMRQIRKDWILIGRGYHVRLPDCLVYARAQICDPSTNKVRATWGYPTGVFIEEARFVYPYLDFLKNRRDDYPLAYGVEIGKGGMGYVDEMFHRAGSGVKAVMTDWRRFDKQIPAWLVRDAFALLKECFRTDVVVDVEGKVWPVNSHITNARWSKMVQYFINTPFRMPDGSRYMKSHGVPSGSCFTNIIDSIINAVVTRYCVYQTTGSFPEYDLYMGDDSVFVTRGVVNLDDIASVADETFGFTLNVKKSYVTSERTNVQFLGYFNDSGYPIRDQDFLIASFCLPERVQEPDPIFTATRAVGQMWSTLNGIAAQKWLLIIQGIENEYSLSPQWFVDHMAEYPNSLKFLRLHGLDANSFPQPGNFDVVDAPMRPPFRPFRRNPVRRVTDVKDLYYQYVDDPIRVDDWIGLERDDIPPDIEDDVLC

SEQ ID NO: 1064 - protein, 684 aa, Partitivirus-like 5
MQEQRTRQLHETREFQKAEQSKQLILSRNPDSDLRRMYDSLRDRLTEREKQAALQSEFDKILQSFRLKNLDKREPFEFYIDALDLSLPANRLPAPGLTALKFKFHTGQTVTITEEVPETGYNVHPIIQYLITCKYPQYQKFIDTYCRPLGSTDATFADFNREQIDSKPIPSDRQRKILSHVTRILDIQPYLPVHFVDTSYAKIPLNTGTGYHNRHSFKINAHAKYSAPDEYRDRPTSKGFYVNAFLESSRTLIHYIKLNGFPFSSDTKVASNPKLRKSRIFRFYLEYPTLLFTRSHISDRDLALKCRPVYAVDDLFLRIETMLTFPLHVMARSHNSAIMYGLETIRGGLQYLDKLAMEFNCYASLDWSQFDQRAPFCLIDLFFRIIRDNIIISHGYQPTYEYPSYPDLTSQKMFKRMNNLINFIEHWYYNMVFVTADGFGYKRNYAGVPSGMLNTQFLDSLVNLSSIIDGMLEYGFTDHEIEQFRFFIMGDDNTFFCDLSITELNQFITWFSTYAQERYNMKLNTEKSTVTCLRNHISVLSYTSNFGMPIRPLGKLVAQLCYPEHGTKMRYMSARAIGIAYAACGMDFTFHCFCEDVYHSFLPYAADYTKADIENIIKHLPGQFKLLDAYLETVNLTHFPSYYEIREIVSKWQGPLSEHPKWDLSHFINPVRDIPDNYQTLSQT

SEQ ID NO: 1065 - protein, 511 aa, Partitivirus-like Culex mosquito virus
MHRACPSVECIRADVDDYNRQYVQRVQNDTYLAVLESVRKDFVPEKPLVPWTLGRCQKQGIPKDKSPGLPWRERGYKTKREVLEDPAACNEIHKYWSLVGKGYRTSSPDTMVYFRSQICGVEANKIRATWGYPMAYTLEEGRFVYPYLEWIRHTKKDVPVAYGVEMATGGMAYIDNAYQDCKLADPTVKTALLDWRKFDKCVPAWLIRDAFEIMLQCFTLNKVLCNDDHEWKVDPAKTRLRWKKVVNYFINTPFILPSGERYQKEGGVPSGSTWTNIIDTIINAIVVRYCMFHVTGSMPMFDVYMGDDSCVFISRGIDLTEFSKIAHAEFGFILNEKKSYVTGERTNITFLGYHNYYGKPVRDGDFLLASFIYPERFHGTPDPAFTAMRAVGQMWSSLNGVLACKWLDLIEDMQTHFGFDVNWFADHVKQHPGALKYLRLTGFDPTLLHVPQRKGWIVTEVEPPPVPRRAPSRRRYDMLVLYQSYFEHYLTEDQVWSSFRDERVKALPVDL

SEQ ID NO: 1066 - protein, 538 aa, Penicillium aurantiogriseum partitivirus 1
MAFTQEPTQHYVLAKGSHLIDSLHLRPAKAGSATSEDVLPTGYNSPNLREIAKFGGYSTYSSASNTDPWVRETLKLFSRERYEEIYGFTRRPEGTPGMYKSLAKFAGEKSHFRDLTVSQQKAMRRSIAKAKKAFKLPYKREPLDWHEVGQFLRRDTSAGSTFMGQKKGDVMEDIYHEARWLGHRMKQDGESSFNPTKMRFPPCLAGQRGGMSERDDPKTRLVWIYPAEMLVIEGFYAPLMYRDFMNDPNSPMLNGKSAPRLYAEWCCGLREGETLYGLDFSAFDTKVPTWLIYTAFDILRQNIEWSTFQGKPVSKQDAQKWRNVWDGMVWYFVNTPILMPDGRMFRKYRGVPSGSWWTQMIDSVVNYILIDYLAECQEVEIRNLRVLGDDSAFRSTDQFSLEQAKVDCEPTHMLLKPEKCEKTKDPCEFKLLGTTYRDGRVHRPTEEWFKLVIYPESSVHTLDISFTRLIGLWLGGAMWDKEFCRYMDFFQSSYPCPEEGWFSKDQKRWLEVIYSGKAPRGWTTKRSLFWRSIFYAYG

SEQ ID NO: 1067 - protein, 573 aa, Penicillium aurantiogriseum partitivirus 1-cp
MSRLRFLRKVSRFPARNETHFDPYVHAALDAVSGPNVKEYVSTIQSEWHRPSGDNAILEDNLMDYGDILPGRSFDGAYLAILKKTLDELKPAEPIIPLTLGAAEKHPRMPSSTSPGFPWTTKGYRTKRDVFEDKSATGMIHRAWDSIGRGIAWRLPDCLGFHRTVASVKEKSKIRPVWGFPTDVIVEEARYFFPLWEELKLINNERDTFYGTGMETMLSGHQHLARNFDTPSVKYVLNSDLSRFDAHVPSWVIRDVFSHISSWFDFSRVRDSEGKIWNCNTQQTCRRWKAMVSYFINTKVRMPSGLRFQKSQGVPSGSMFTNLIDTCVNAVQFRTALYHAYGELPIKDYYYGDDSCIFLREIPDLEAIAKVLLRQFGAELNVDKTILSDNPDNIHWLGYYYRSTGPRRSLDFIIASSLYPDREIESPLDSAARLLGQLYSCMDPKVAVTFYDCITWLQCTFNITTSDLNSYVASLPSKAMKYLNTLGLETSEISLPRCAADPFGGRYIPDLLPHPCARNFFRFRDRHLPRFAFCAEAYQNRSLRQRIFKDLDKYSSTFNQHFDYDLDAQYFTD

SEQ ID NO: 1068 - protein, 569 aa, Penicillium brasilianum partitivirus 1
MIEGIQNVYQRGVALQRRLRLRELYPEGIVPYIKKLEYDGTIASTIGPCATVAPPVTKSFRRKYPLELYEKREYTYDFQHMLYIGKMDAYSFNTSVPKFDPWFRSVLKARAPDLVAHLENTYMRDPCTPERITRHIALFDRTWLSKPNDIFMHQAEQIVKDLFAPVGQVEPIDFNYAGWMEILPHLDMTSSPGLPLRREYHTQGECLGHIYDKTKRLNHFAKFLPPPSVRAPPCMIGVRPGLIRRDELDSKIKARGVWAYPAEVKVMEMRFCVPLMKRMSSVFGKIPYLTGRNMNKALPFCIDHLLNDGNFGFVTDVSKLDTSIGPDYIDWAFALLASFFHMGITASSVKRNESVFDFLKYYFKRTPILLPSGQLVRKQGGVPSGSGFTQLVDTLVTTLFTVYTMLRMGYTRADIEGKIFVVGDDMATSVPEDFDVPKFVELAGELGFDINLSKVMFSNKGIELKFLGYSKYGGGIFRPPEELLQGAFFPEKFVGNQDRARQRILGQTIASGLCSGFLSKVNYWMADLDLQRPFDPGESYIPQNRWLRNVLGIEELPTSTIVFDLYPLV

SEQ ID NO: 1069 - protein, 539 aa, Penicillium digitatum partitivirus 1
MEDSPFDPTLLDVALEESHLVDDSLLSPSNRTSGASYGIISEKFSSPGLREIARYGGYSVYNGQSNTDAWIRTTLKEFDRSVYDDIYGYTRRPQGTEGMYKSLLKFSDGKNSFTSLNRVQRKSMIDAIAKAKKAFKLPYQREPLDWHEVGRHFRRDTSAGVSFMGSKKGDVMEEIYHEARWLGHRMKQNGRAKFNPSKMRFPPCLAGQRGGMSEASDPKTRLVWIYPAEMLAIEGFYAPEMYHAYMDDPLSPMLNGKSSQRLYTEWTCGLRDGEMLYGLDFSGFDTRVPAWLIRVAFDILRQNIRWDSFRGEKVSKRDAQKWRNVWDGMVWYFINTPILMPDGRMFRKYRGVPSGSWFTQMIDSVVNYILVDYLAACQQCEIRALRVLGDDSAFRSCDPFSLEVASHDAECVNMVLHPKKCEKTKDPTAFKLLGTTYRNGRPHRETSEWFKLALYPESVVPNLHVSFTRLIGLWIGGAMFDSAFCRFMEYYQTCFECPLEGWFSKDQRRWLQVVYGGKAPRGWTTKRSLFWRSIFYVYG

SEQ ID NO: 1070 - protein, 479 aa, Pennypacker partiti-like virus
MPLRYIGRTRGFPSRTFDEIYPSKYVLPFLNGVPNKRRSPVTQKLIIDDLKQFDNSSERPVDPVLDLAIAHATRKFMLPSPVKMKHLNDVFRMESDIWTKSPGLPWTNYGVKTKGQIRDDPERVREVRKFWHYVKAGDKMSFPDCCAFVRSHVCEVDEFKVRAVWGYPATITFGEAVFATPLIEAYQSLPSDNTPVAYGLETATGGMRRIKDRFVKTGLYYAGLDFSKFDKTIPAWLIRIAFDILRCNIDFTYYQDHGIADARRMIVMYEAIVDYFINTPVRTALGLRYRKNSGIASGSYFTQLVGSIVNCILLYYACLQTVGRMPFDSVFLGDDSFLSTSRPLSIGDIAACLSRFGVEINTKKSQVSSSIDEMRFLGYCINHTLPYKPADDLLTSLAFPERPDESWDDAASRALGIYYANFGMNSDVSEICWKMVNVAEFNLTFGRGFERMLKHVGYTDLDKHLPAPVEFLRRLSVFC

SEQ ID NO: 1071 - protein, 477 aa, Persimmon cryptic virus; identical to SEQ ID NO: 600

SEQ ID NO: 1072 - protein, 483 aa, Peterman partiti-like virus
MGYAISDEVMRLRTYQYQNRRAKDTLKFLNSETGVIVEGSVKRALLEQGFLLNDQRDNKSHFEPQSSFDNLLKYAVYVPFNPDQEAWNKAYSATVHAFVLPMNQSIKQDMDPRSVFASVKGDKSSGAPEFSSKKDVSEKDYVRMLNWLRGCKAPDPCVAYHRVQHGSDGPRFRLVWGYPQSVTMGEGTFARPLIDMYKERRSVMAFGKTRHKLSAQMTSILNSHARYGLDMSRFDASIHASLINMAFNVLSKNFDWYESCYEDWQKIERYFIHTTILMPDGYVYTKHRGVPSGSYFTQMVDSVVNYFAIQYANFRLTGKLLNENKILVLGDDSIFGSDDAISIKEYARVLLELGLTVNQEKSCLALEHQQVEFLGHIWKSGLPDRNPIDVAKRMVYPENHSKITDGRVRIKTRVYPYVTDALSAHKIITEYQKCPNGIIPMYSNVDIDWKEGLTGWQELQTLNDNDLLINRDCLMQAYVGLLR

SEQ ID NO: 1073 - protein, 284 aa, Phlebiopsis gigantea partitivirus 1
LHFLHLWYNNMAFLSIDGFAYWRLYAGVPSGLFNTQYLDSFINLYILIDALIESGFTHEEIRALVLFVLGDDNSGFTLIPFSRLVSFVAFLESYALRRYNMVLSKTKSVLTTLRSKIESLGYQCNFGRPKRDMSKLVAQLCYPEHRMNYKNMSARAIGMAYASCGNDPTFYAFCYDVFCMFLPFYEYDARTDLQLARKLQLTDPDQLLFETKHLNFPSLFTIRKCFDRYAGPLEYAPKWNYAHFINGPDVVPPSAKTMHDYEIEHDLKVRQAPTFRQADLLPLV

SEQ ID NO: 1074 - protein, 412 aa, Phoma matteuciicola partitivirus 1
MSDFKLDAPVVPHWIKDVDLVKSTSSGYPHFERKGDILETILQEGRFHFHHLKLYDLKRCPLLPCTVSTRGGLSESTDPKTRLVWMYPAAMTACEAVFAQPLIDKIYSEKAHLLLTGVDSKYRIQKYLSLISDDADRCGIGMDFKSFDTLRSNRLIRDAFAVLKQNIKFGYYYDKISGLQKGRSGVDVRAERAFDNIVEYFIHTPLLLPNGRMVTKHHGVPSGSHFTNLIDSIIVRILIKTFAYYEDIPIYELRTNGDDSAFSAYSDYSVGILEKAAVFFDKFFKMTVSVAKSCVATAPSAMHVSGTVWKGLRPSRPTTEWFMLAAYSDTYIDKPFDSFQRLLGLGIAGGFGDATFTRFFQYFQSGYDCRQGPRILNWNKLRWLEHAFNITDLPLLYKQGSRTHVRLRLLAA

SEQ ID NO: 1075 - protein, 539 aa, Phomopsis asparagi partitivirus 1
MEDYTQDPTNHYVLAKGSHLIDALHLRPAKSGSTTSEDILPPSFVDDNLREIAKYGGYSTYSSNSNTDPWVRETLKLWDREIYEDIWGYTRRPQGNPGMYTALKKFAGPKNQFGDLKPWQKKCMRKSISKAFKAFKLPYQREPLDWHDVGQFLRRDTSAGSTFMGQKKGDVMQEIYHEARWLGHRMKQDGKRSFDPTRMRFPPCLAGQRGGMSTRDDPKTRLVWIYPAEMLVVEGFYAPLMYRDFMNDRNSPMLNGKSAQRLFTEWSLHCREGETLYGLDFSSFDTKVPAWLIKVAFSVLRQNINFSTFEGKPVGKQDAQKWRNVWDAMVWYFINTPILMPDGRMFRKFRGVPSGSWWTQMIDSVVNYILVDYLAACQEVEIRNLKVLGDDSACRANDQFNLEQAQVDCEPVGMILKPEKCEKTDDPADFKLLGTKYRDGHVYRPTEEWFKLALYPESSVFTLDISFTRLIGLWLGGAMWDRRFCEFMDYYQSCYPCPEEGWFSKDQKRWLEVIYSGKAPRGWTTKRSLFWRSIFYTYG

SEQ ID NO: 1076 - protein, 518 aa, Phomopsis vexans partitivirus 1
MNEESFIDMTYAGLTYYTSLAGRYVVKAANSLAYLGRHNFGTPQREEFTTFIDPGIKEAIQSFPGDIDLDKFDNFSRSYYSLRGHMDALYNFGSSRRASEPVNDPDWLATKEHCFQLFSTFPMVHAMDFETELKQVPFEPTSSAGIGMPGKKGDGDNHKRAVRQASATVYHCISDGIQHVIDNSTPDMAFVRTQLTDLTKQTKIRHVFGQAFQYILLEGLFAYPLLSMFMMIDSPYFLGRDPRTDVVKFIERLTTTGKDMFSTDWSRFDQTAEHWELTYVFELFESIMKIPNSHTQTAWEFVKIFFINRKIAAPDGTLWSKARGVPSGSYFTNVADTFINYARIQYMSKRITGQFIDPDHIRLLGDDALFAISAAYGINPYRLSQAIPDDLRDIWILRPDKMSYGRSSDLVEFLQRTLKFGDQHRDNDRVERLALFPEYPITDKRISAYRARALWEDGNYESNMLGYVTAYLEHKYGTPDKKEIPRWVQTWVEKLKLPVTQDTAPVWNKMNENTRRSI

SEQ ID NO: 1077 - protein, 535 aa, Phyllosticta citriasiana partitivirus 1
MSDVVLDIPSPELTDALPEGVASRESPSLRTRGDYDFVREATLKPGLSEIARYGGYNQYMAPGNTDPYVRESLKTFDRDLYDQIYGFTRRPTGLKGMYESLAKFGDEPLHFDSLNRHQKRCMTKAIARARKAFRLPYKHEPLDWDEVGQHLRRDTAAGATFPGKKKGDVLPEIYTEARWLGHRMKQGGKGSFNPTKVRFPPAMATQRGGLSEIDEPKTRLAWIYPAEMLVVEGLWAPVMYREFMKLPGSPMLNGKSSQRLFSEWAVNVKEGEKLYGLDFKSFDTKVPAWLIRVAFSILHQNVAWDTWRGKPVSPVNRQKWRNVWDGMVWYFINTPILMPDGRMFRKHQGVPSGTWFTQLIDSVVNYILVEYMTTCQDVEPQNLKVLGDDSAFRSGLDFSIERGKEDAIAVGMTLSPKSEVTTDPTELKLLGTTYRNGHAHRPTDEWFKLALYPENPVSELGVSLTRLVGLWIGGAMWDTRFSKYLEYYQTCYECPKYGNFSKDQRRWLEVVHSGKAPRGWTTGRSLFWRSFFYTL

SEQ ID NO: 1078 - protein, 752 aa, Picoa juniperi partitivirus 1
MLSISQIVHLYVLLKFQHFRRRNETASELIFPIRNILFEWESRRSQDRDSPLRILDYSSTLLAYIDLRTCHNIAHNIEHEKQAILDSYSQRDESFALYESIEDSDLPEDRSPAPGIQHANLRYHSIPSSAINVEDKIDNLNDLPTLTQTPLMSLPALSSEQPDLSGLPAHPDIANIINNWFPQYSVHLDTYCRPPSFGPQAFHDFNRETPDPAPPTPERHEAIMSIVRQKFNIKPFRPLHFADALAAETPLNTSASYYSKFDPETRVLARYSCPSRYKDKPTSKGYFINVMLNKFRREFHNIKYDGMPFPTDRYDHETNLELLETWFAKHPTQLFIRTQISKRDPSDPKKIRPVYAVDDRFLHIEKTLTTPLLAQMRNPQCCVAHGLETFRGSMSLLDKIALSFSCFTSLDWSQFDQRLPRYVIIAYYLDFLASLIIVSHGYMPTRNYPDTIASLPSFAQRQYNVLLFLCIWYLSLTFLSYDGFAFIRKHGGVPSGLLNTQSLDSFGNMYIITDCLLEFGFTEQDCLQMLFCVMGDDNLIFLQHNLNRVTEFMVFLEDYCTTRHGMVLSLLKCVFGNLRSKISFLSYENNYGHPTRPIGKLVAQLAFPERPVPLKREWIHAARALGLAYASCGQDPVFHLLCKMVYEKFRPSPPVPTHHIDKVFKKWKYQLPEFMIEDVEYTFPDFPTSQEIYLLVSDFQGHFSENDKWNFNVFNAPPSDNLPDYVTLKDYIQTDSEMSKTVNEIWHGKRSL

SEQ ID NO: 1079 - protein, 748 aa, Picoa juniperi partitivirus 2
MLSISNIVTIFVLLRFQHRRRSKQTLNVPSYPVRNVTYEWYLRLAIPRNTPISETAIDYSRTLLAYIDLHTCYQLMITLDARKAKILERYTRINEPFALYQPIDPSSFPNDRLPSPGLRILPFRFHSIPAGFTLPEQGIEQPTYHDPNSPTLDLDTDLSGAPANQDIVKIIHEWFPFFEQFVDKYCRPPSYGPQAFIDFNKPTELISDPSPERENDILTVINSTFAIKPYRPLHFVDAQAAMTPLSTSAAYHDKFDPETLVISRKATPQIYAARQMSKGHHNNVMLNTFRLELHNIKVDLPSRDDLIHFFLKHPTQLFIRSQISLRDPQEPKKIRPVYAVDSRFLHIEKMLTTNFLAQMRNPECCVLHGLETFRGSMQFIDQIAHSFNFYVSLDWSSFDQRLPLSAIKCYYTRVLPSLLIISDGYFPSRGYENTAQPIDHFARKVFNILSFLYTWYRNMVFLSFDGYAYTRLNGGVPSGLLNTQSLDSFGNMYVLADCLLEFGFTTTETQGMIFFILGDDNIFFVNQPHARMIDFMDFLDTYALKRHGMVLSVLKSVYSKLRTQISILGYTNMYGMPIRPLGKLVAQLVYPERPVPEDKQWMHAARALGLAYAACGQDSSFHQLCFHVYRHFKPDYPVPSSQFRKWIKFTVREIINFETDAELTTFPEFPSLQEIRSLVSTYHGPFSETDKWPETLFEDTPPSDNLHTYTTLDEWLRTHPEFQFDSENYMPGYDAPDALSIAFSNLQI

SEQ ID NO: 1080 - protein, 530 aa, Picoa juniperi partitivirus 3
MEILRHKLNIRPYRPLHFADALAAETPLSTSSSYFSKFDPTVRIYAKYSNPTRYSTKPTSKGYFVNVMLNQFRTEYHHIKYDQLPFPHSDLSDEQRQTLLDTWFAKHPSQLFIRTQISKRDPSEPKKIRPVYSVDDRFLHLEKSLFTPALAQMRNPQCCIAHGLETFRGSMSILDKIALCFTSYISLDWSQFDQRLPYYVIIAFFLDYLPSLLIISNGYMPTHDYPSTAPPNPTDFASRIFNLCYFLTIWYLNMPFLSYDGFAYVRQHGGVPSGLLNTQFLDSFGNMYIITDCLLEFGFTSNECQEMLFCVLGDDNLIYLKQNINRVTDFMLFLERYSLSRHGMVLSVLKSMFSSLRSKITFLSYENHYGKPTRPIGKLVAQLAYPERIVPSERSWIHAARALGLAYANVGQDPVFHLLCKMVYERFKPDDPVPSYHIQKWFAKWQHMLPEFETTSEEYFFPVFPTCDTIAQMTSYYHGPFSETDKWNFNVFMVPPSDNLTDYVTLKDFMLNDQQKTQQVNRLWHGKRSF

SEQ ID NO: 1081 - protein, 358 aa, Pinus sylvestris partitivirus NL-2005
SAAGYGYTGRKGDPGNHIRAVRTANATIRDLADQMISNQSQTVYNWLMYTTPDIAFTRTQLSYLPDKMKIRNVWGAPFHSILIEGLTAQPLMEYFARHRTFFTIGEDPKIRVPQIISELVQNRTVYCIDWSGFDASVSAEGIDFAFSLIKRMLTFNSELDELCFEVSRLNFIHRKLIDPEGRILLKHRGIPSGSYYTMLVDTIINARRILYMFHHLTGELPTVHCQGDDSLTGVRPDFQVSRGHIAAICKEQAWDINPDKLKISRYPEELEYLGRTSSGDYNHRERQKVIRLAIFTEYPVTSPQISAARAHALCIDSSYRIPELVQAWKSLTRQYGEVPPEQLDRRLRPYDPTKFLRA

SEQ ID NO: 1082 - protein, 477 aa, Pistacia cryptic virus
MDHPYRGIREGLLVLDEIPIRRSRDEFKIIVDPYAAQAIRVKVPYTLRQELEGWARSYYSLEKHIEAILMYKRPKLPQPSDDCWNTTKQFVLTYFRRLPKVETLSFKDFDSVKWISSSAAGYGYIGRKGDNDNYHRAKRIAITISESLNHDANYMSQAIQQSTPDIAFTRTQLSLIKVKTKVRNVWGEAFHYVLLEGLFAEPLINRFKDLESFYFIGKDPLLAVPALIEEILSAKDYVYMFDWSGFDASVQEWEIRFAFECLESMLIFPSTVETQIWRFVIELFIYRKIAGPNGVLYLKTQGIPSGSCFTNIVGSITNFVRIQYMFKRLTNRFAEVYTHGDDSLAGVDLTQYVPMERFSEVCDPLLWSINTAKSAVSRRDENISFLSRTVRERQNTRDELTCLRMLMYPEYNVLSGDISAVRAKSIYLDAGINSYYLYVIYRYLRERYGLAQVLPFEYRRWDPIEYEARKTSASEIM

SEQ ID NO: 1083 - protein, 482 aa, Pittosporum cryptic virus-1
MVKDTLVGYNYTRYQGDLVRTDRQHPHVIRREHATTYIDQFAFKQVELVAQLIPEQILTGWSRSYYLPEKHLEAVLQFGQPNIPVSAINVDVYRQSIAEAENRLSGLPTVRAYDVLTQLDQVPFKSSSAAGYDYQGRKGQYDGENHKRAITRAKAVLWSAIADDGEGIEHVISTFVPDVGYTRTQLTDLLEKTKVRQVWGRCFHYILLEGLVASPFINELMKHDTFIHAGKDPIFSVPELLSNVARNCRWLYALDWKQFDATVSRFEINTAFDIIKRKIIFPNYETEQAFEITRQLFIHKKVAAPDGYIYWSHKGIPSGSYYTSVVGSIVNFLRIDYLWRTLTGHPPKELHTLGDDSLSGDDILIEPQRIAEEAEKIGWHFNPEKTEYSRIPEHVTFLGRTYIGGLNKRDLTKCLRLLVYPEYPVDSGRISAYRANSIAQDAGGLSDVINRVANKLQRTYGIASEEEVPSHFKRYVIENIGI

SEQ ID NO: 1084 - protein, 575 aa, Plasmopara viticola lesion associated Partiti-like 1
MTLKSLAKGRRFRLSDQIANIDKYARDALYRVSIDHGLSKDFLHVCKEWHRPIPDIHSLRTAVLGYGCQDPDRCLDPVYFSILKQTMDEFRPSKKLIPHTLGAVVDISDFPRTRSPGFPWNTQGYKTKEEVLRSPEARGYIQREWDSIGRGVGWKLPDVQAFHRTVVSPKSKQKVRLTWGFPVDVIAEEARWFYPMWSHVKSVSQTAGTCYGVGLEIGLGGIQYLQDQMVTTGYNALCGDFSQFDSTVPGWLIRDVFAHMSDWFDFEHVIDREGIVWDVNPNKTVRRWKAMVSYFLSCSIRLPNGERFKKSKGVPSGSMFTNFIDTICNAVATRYACMQASGRLPLRDYYYGDDSCVMIKGLNVTKFADVLESTFGLKLNMDKTIYTCNPRNIHWLGYYAREGLPKRELDFLLASSVYPEKKIVHPVESCARLLGQLYSTMDPQLASIFWLALEHIRKRANLTVQAVEQFAKMNISKALKFLTVLGLSPSELELPIASPDPFSLTGLRINNVLPRSPSKRLNGMFDRHLLTEVGAPESYANTHIRRMNFYLFYDYYGFCRDEETSWSRLYTRSLL

SEQ ID NO: 1085 - protein, 572 aa, Plasmopara viticola lesion associated Partiti-like 2
MAPLRMLKRVSRFPSRTDSYFDTFSYEALSAVSGSAGKSLIESIKSTWHRPSGDNATLEKNLLLYGEEVPSRCNDGDYLAILKHTIDEIRPTEKIVPLTLGASRLHPNTTRVTSPGFPWVNQGYATKGDVYDDASAVGKIHMAWDMIGRGIAWQLPDSMAYHRVVASPQTKTKIRPVWGLPCEVILEESRYFHPLFSELKEIANERDAFYGIGMETYLSGHSHLARNFDTSTVKYNMSGDFTNFDARVPAWLIRDVFAHISSWFDFSRVQDSEGKVWNVKTAQTCRRWKSMISYFINTKIRTPTGLRFQKSQGVPSGSIWTNLIDTICNAVMTRVALRRLSSLPEKDYYYGDDSSVFLREPIDLDAFADILKTTFGAVLSTEKTMLTNNPENIHWLGYYHRTTGPRRSLDFIVASSLFPDREVSHPLHSAARLLGQLYSIMDPVQSVTFFDAIRYLQNKYNIETWLVESYVSALSSKAFKYLQTLGLSTNDISLPNIGIDPFGDRFILDLLPKPSARNFFRRRDHNLPKYAFVAEAYQNRELRSPRFKDFHLFTQTFSWYNEFAEDRHYFTD

SEQ ID NO: 1086 - protein, 539 aa, Plasmopara viticola lesion associated Partitivirus 1
MEDFTLEPTQHYVLAKGSHLIDALHLRPAKTGSTTSEDVLSSNFMDPNLCEIAKYGGYATYSSNSNTDPYVRETLKLFSRDIYEEVRGFTRRPEGTPGMYKALAKFTGAKNTFSSLSPSQQAAMRRSIGKAKRAFKLPIKREPLDWHEVGQFLRRDTSAGSTFMGEKKGDVMEEIYHEARWLGHRMKQDGKDRFNPTKMRFPPCLAGQRGGMSERDDPKTRLVWIYPAEMLVVEGFYAPLMYRDFMSDPNSPMLNGKSAQRLYTEWCCKLREGETLYGLDFSSFDTKVPAWLIRVAFDILRQNINFETFDGKPVSKNDAQKWRNVWDGMVWYFINTPILMPDGRMFRKFRGVPSGSWWTQMIDSVVNHILVDYLADCQQVEIRNLRVLGDDSAFRANDQFDLEVAQHDCEPTGMILKPEKCDKTCDPCQFKLLGTRYRDGHVFRDTSEWFKLALYPESSVLSVDISITRLIGLWLGGAMADRVFCQFMELFQSSYPCPEEGWFSKDQKRWLEVIYSGKAPRGWTTKKSLFWRSIFYFYG

SEQ ID NO: 1087 - protein, 441 aa, Plasmopara viticola lesion associated Partitivirus 10
MYTALNKFSGERSTFRDLSPSQQASMRRSIAKAKKAFKLPYKREPLDWHEVGQFLRRDTSAGSTFMGAKKGDCMEEIYHEARWLGHRMKQGGKRSFNPSKMRFPPCLAGQRGGMSEIDEPKTRLVWVYPAEMLVVEGFYAPLMYRDFMNDPLSPMLNGKSAQRLYTEWCCKLREGETLYGIDFSSFDTKVPAWLIRVAFDILRQNIEFSTFEGKPVDKGDAQKWRNVWDAMVWYFINTPILMPDGRMFRKYRGVPSGSWWTQMIDSVVNHILIDYLADCQQVEIQNLRVLGDDSAFRANDQFDLEVAKLDCVPTGMIIKPEKCERTKDPSEFKLLGTRYRDGRVHRDTSEWFKLALYPESSVYTLEVSFTRLVGLWIGGAMWDKVFCEFMDFYQTCYPVPDEGWFSKDQKRWLEVVFSGKAPRGWTTKRSLFWRSIFYAFG

SEQ ID NO: 1088 - protein, 388 aa, Plasmopara viticola lesion associated Partitivirus 2
MLLSEIPNVYQRALALERRIRLKELYPDQIVPYLARQEFAGAIAGPNGPRSVAPSVTTSFTAKMPLDQYPDSKYVYEPKNTMIYIGKMDKYPMSSSVPKFDPWFRHVLKLRAPQVVRDLEETYVRDPCTPDRVMKHFALFDRYWKNLPTGKHMAEAKSILTEMFAPVGKVEPIDFNFAGWHEILPHLDMTSSPGLPLRREFPTQGECLGHIYDKTKRLNHFAKFLPPHAVRAPPCMIGLRPGLVKKEELDEKIKARGVWAYPAEVKVMEMRYVVPLLSRFSTLFGKIPYPVGRNMTKALPFFIDHILQGKKFGLVTDISKLDTCVGPDYIDWAFDFLRDMFDFGITKSAETRSSNVFDFLHFYFKRTPILLPSGQLVKKVGGVPSGSG

SEQ ID NO: 1089 - protein, 523 aa, Plasmopara viticola lesion associated Partitivirus 3
MADSFVDDDETFGNDNPSVWDYPFRYITETRRFPDYKRGILRQTQRYDPFVDVALKHFDPELREEIKGYTRSPGDEWDLADKFRKYDTATLSHPTGNARFTAAYDQAVKTVMKELKLFDPVAPHWILDIDLVKSTSSGYPHFQRKGDIFDQLRQEGRFHFHHLKLFDLHRCPLLPCVASTRGGLAEASDPKTRFVWMYPAAMTACEAVFAQPLIDKLYSEKADYFLTGVDSKFRIQKFMSLLSDEEGTSGIGLDFKSFDTFRNTRLIRDAFAVLRQNIKFGYYYDKVHGLQKGRSGVDVRAEKAFDNIIEYFIHTPMLLPNGRCVTKHHGVPSGSHFTNLIDSIVNRILITTFALYSDIPIKNLKTNGDDSAFTASISYSTGILEKAARFFDYFFGMTVSVAKSCVATGPSDMHVSGTTWSQLRPHRPTTEWFMLAAYADTYIARPFDSFQRLLGLGIAGGFGDAKYVQFFSYFQSGYDCRHGPNLLNWNKLRWLEHAFNITELPLVYKQGSRTHTRLRLLAT

SEQ ID NO: 1090 - protein, 523 aa, Plasmopara viticola lesion associated Partitivirus 4
MSFDDIDNDDTFGEENPIVWDYPLRYATETRRYPDYKRGILRQTQRYDPYVDVALKSFDPELRERIKGYTRTPGDEYDLHGKFLKYDRAPLLFPSSDKRFVASYQLALQQTMKEFKLDAPIIPHWIKDVDLVKSTSSGYPHFQRKGDILDQILQEGRFHFHHLKLYDLHRCPLLPCTMSTRGGLSEQTNPKTRLVWMYPAAMTACEAVFAQPLIDKLYSQKADLFLTGVDSKFRIQKYLSLLSDEKDTAGVGLDFKSFDTLRSNFIIRDAFAVLKQNIKFGYYYDKITGTQRGRSGVAERTEKAFDNIVEYFIHTPMLFPNGRCVTKHTGVPSGSHFTNLIDSIINRILIKTFGFYEMLNIRSLRTNGDDSAFTMLEERTTGVLHKAAVFFDKFFKMTVSVDKSCVALAPSEMHVSGTTWRALKPTRPTDEWFMLAAYSETYIQSPFDSFQRLLGLGIAGGFQDAHFVQFFSYFQSGYDCRNGPNLLNWKKLRWLEFAFNITDLPNVYKQGSKTALRLRILAA

SEQ ID NO: 1091 - protein, 669 aa, Plasmopara viticola lesion associated Partitivirus 5
MSTLIIPQDTIVSTFDEAVAAESNLRVDEVPEDYLERFVHPSEPENFEFYTQRTTTVPQNRLPKPGIEILDNLQYHTNSKDDLYKNQPDSGPRPMVGVTNIIREFFPQYLEDLRIWCRPKSSNNSIFNDFNHEQHPVKPFTESRATRLLPLIDHFLGIQPFDIVHYCDTRFYPWKLSTRADYFHNHSRARKKHAIQSHPDYATGPTKKSYFINAHLFYDRSTVHNIKNYGFPFKPTGDDRRDQDLLDLWFKKIPTELLVRTHISKRDKLKVRPVYNAPMIYIRLECMLFYPLLAQARKRDCCIMYGLETIRGGMIELEKIANKFSSFLLIDWSRFDHLAPFMISTFFFKKWLPTKILVDHGYAEINNYDEHIHSFTAQAAKHGVNIKSKVYSDRPDIPVFANKVNNLINFLETWYRKMVFVTPDGFAYRRTQAGVPSGILMTQFIDSFINLTVLLDGMIEFGFTDEEIRDFTVYIMGDDNVIFTLLTLQKLIEFFDWFVAYTLHRFGMVINISKSAVTSIRRKIEVLGYTNNYGLPSRSISKLVGQLAYPERHVTDVDMCMRAIGFAYASCGQNRSFHSLCDKVFKHYFAKVSISGIVDLSTMKGDLPGMFFAYPDVADHIRLDHFPTIEEVRSVLSQFSGYLKETPLWDYSYFKNKPNPERENKITLA

SEQ ID NO: 1092 - protein, 572 aa, Plasmopara viticola lesion associated Partitivirus 6
MEQLIQSMNKLTINSNYVFIGDTDHRQLPVQTNQFALEAHKKTVLFSMAKHLFTHEVEQVLSLRRPDPNDINLVYSDFFAGDIPPHSIEKDDIYYQALNHVTDLFCPPQPVRPTHIFDVRYHYPHERSSNAEAPFSTEKFFRDKAPRPPPGTKINLFSVGNMYDVIFDWTRHFHHKIKQGANYHDYLWYIQLHNRTSLVGPSDPDKIRSVSGFPRPQNIAWIMFLWPYLSWLKTRDPRTSPMLWNFETNLGGWFRLNYLLYTGFHTRTIITLDKSKFDKFYFFAIQDDIDNMIENFLDLNHGYIPTTDYPDTSKDWTLNKAKRLRRLLHWLYYSFRACPTVTPHGQMFRRRFAGMPSGVFPVQLFDTIYFAITDTDVLLRMGISPAQIRLRKGQGDDIITQLYICIPPNAHDSFLSTYSRIDNERFGSTISVTKSEMRNSPQGAHVLGYRNKNGLPVRDTVDLIGSLYHAKARQINESISMSIAVGIAHASLMHDKRVYAICKDVYYYYANQGFTMNQNWLRRFYAYTGISLSHVTDFPTPDEICNKLFDFSFEPRKQTVDYFPRSHFLSEF

SEQ ID NO: 1093 - protein, 711 aa, Plasmopara viticola lesion associated Partitivirus 7
MSKSNPIRDYLSERNLRIKTEWKLFQQSQNSDESLSQLTSDSDLKRLYHGSRHYLTEQEKSHALQSQFDQILHDLQIKNKDKHEPFEYFTPRLLPVPSNREPSPGITLLPLQYHVGQTVTTSEHLTEQGFPLDPILTTLLTTKYPQYLAYTQKYCRPLGTTESTFADFNKPQIHISPSLPERKERILKHIFRYLDAKPYLPVHFVDTLYAGLPISTGTGYHNRHSYKIKAHARYSHPKEYASKPTSKGYFLNAFLEQARTIVHRIKLSGLPFPWTLPSNPTDQDFTALHSRLNSFINEYPTLLFTRNHISDRDGKLKQRPVYAADELFITIETMLTFPLLVQARHFQCCIMYGLETIRGSNVYLDALAQLFRSFFTIDWSAYDQSLPRPVTSCYYEDFLPRLIVINQAYQPTYEYPTYPDLTEHDMYSRMRNLLSFLHCWYNNMTFLSQDGYAYRRTYAGVPSGILNTQYLDSFGNLYLIIDAFIEFNLTDYEIEEILLFIMGDDNSGFTHWPITRLEQFLTFLTYHAKQRWNMNISLSKSVITTQRQNIETLSYKCNFGKPLRPLPKLVAQLCYPEHGMIYKFMSYRAIGIAYAACAMDVTFHNFCKDVYYTYLPYQAELTPDIIGNIIKFLPGQFKMLDSYVETIDLSRFPTLQDVATTISKWQGPLSFSPKWNFAHFINAPDTTLPHPKTMTQYEEEYNIIVSSPPML

SEQ ID NO: 1094 - protein, 539 aa, Plasmopara viticola lesion associated Partitivirus 8
MDPFFSQDVDSLSDSSSFGVQPGTESLFDPSKRTAKRHKEAGSFYNGYALKEIARYGGYSTYSPPGFTDSWVRTCLKRFDFSLYRSLHGFTRRGSGLEGMYKSLYKFDGPTHRYSDLNHQQQRAMNRAVARARKAFELPHKNQPLDWHEIGQHMRVDTSAGISFPGKKKGEVMREIYDAARWLGHRVKHSGKLGFNPKRVQFPPAMAGQRGGMSQRDDPKTRLVWVYPAEMLVLEGHYAPMLYRQYMERPDTPLLTGKSAQRLYAEWLCKYRDGEVLHGLDFSSFDTTVPSYLIHAAFDIMHGNIDWEHWDGKKVGQRDRQKWKNVWDACKWYFINTPIMMPDGRMFRKSHGVPSGSWFTQIVDSIVNYILVEYLAECQDLHIQSLRVLGDDSGFRAPHPLDLVQAQRDADGVGMTLKPEKCDTTTDPVEFKLLGTTYRDGHAFRPDEEWFKLALYPENIPPDVSTSITRLVGLWIGGAMWSATFCKFFEFYQTCYPCPQSGMFSKDTRRWLEIIHGSKSPRGWSSSHSLFWRSIFYTL

SEQ ID NO: 1095 - protein, 608 aa, Plasmopara viticola lesion associated Partitivirus 9
MKNLNFLRTLEISSFTSHVREKFAEYQPFRLDWLVNRAKRYFSENEVEKALSNRRSEHNEEALINDFKSFEQPYHPIPKDGHYRRAVACVTKLFDPGRVLLPVTFPDLRYYPWKLKPNAEAPWNIPDFTFTPTFRDLDDESENPKLEERLSRLSNWISERTVTIRQYLNTKYIIGMIDNQFPKFHNLYNEIFQYNRTLVHQIKEGHPAFWKNGVPRTYYWTTLHARSHVVGKDEPDKIRAVFGVTKLLLMIENMFIWPLQATYLNDPDKGRLLWGREMIRGGWKKLFAEIHNSGNPNTYLSLDWSQFDKRLLFELIDEVHSIWRSYFDFSRYQPTSFYPNANPRRPERLERLWQWMCYSIKHTPIRLPNNELWSWNYNGFSSGFQQTQLMDSFANMIMILTSLSALGINIDNKNFWIRVQGDDSLIAFYEQIYLIYGPNFLTSLGDTAMYYFNAKLSVKKSQLSDRLHGMSVLSFFNDFGLPARTDEDLLRHLFFPERNQDLARTASAALGLAYAASGCSPAFHNLCEYIWTKLVKEKGFSPNEESIQWLERAGVFTELDVKAMLSEEFPTLLELRAQVWFHTARSVQERERLWPTEPGPRGRFFFLP

SEQ ID NO: 1096 - protein, 495 aa, Poaceae Liege partitivirus 1
MQRNCTLNGYDFKDYENEFSALPGSHPHVIRREQGVTYHDEYALRILRARYPEYYTQFIEGWSRSYYLGSKHMESIRQYDSPNHSAQDIDVPAYRTAYAHVKNRLRSLPIVRAFDVLTELDLIRFESTSAAGYDYVGPKGPIDGENHKRAIRRAKATLWSSYDPEEGIDHIIKQMVPDVGYTRTQLADINEKTKVRGVWGRAFHYILLEGTTANPLLTALVNNETFIHIGPDPTISVPNLLSQASKHCDWLYAIDWSNFDATVNRFEIHAAFDLIKEHLEFPNPETEQAFEISRQLFIHKKIAAPDGHIYWTHKGIPSGSYYTSMIGSIINMLRIMYIWQVIMQRTPQFCIVQGDDSISGDAELVDPLLFKRAAEPAGWVLHPKKTEISRYPEGVTFLGRTSSGGMNIRDLKRCLRLLILPEYPVPSGAISAFRANSIAQDAGGRSAVLNAIARALEQEYGRAFHYILLEGTTANPLLTALVNNETFIHIGPDPT

SEQ ID NO: 1097 - protein, 607 aa, Poaceae Liege partitivirus 10
MDYLVSAFNRITHWFVKETNFELVGNYSLPPGLLRVNDVAIRNHKQTLLHAFNTYLFDDEIKLVTVDYRRSDIDYPSILQDFFNGDVENFEIPFDEHVEYGLRCMADAFRPPRPCRPAHILDVKHHYPYKWNVNSEPPFSTDEYFLSQRMTFGKFIQMHEYEHIDKEDFFRRHPNTESHDMLTTIVPPKFGYQKSSIFSWTRRWHHIIKDGFRESTGLTTNGYFYNRFIFPMLLHTKTAIVKKNDPNKMRTIWGASKPWIIAETMLYWEYIAWIKSNPGKTPMLWGFETHTGGWFRLNHLLYCGLIKRSFLTLDWSRFDKRAYFPLLRRIMYTARTFLTFDEGYVPTYAAPAHPQWNHAKTIRLERLWLWTLENLFEAPIILPDGRMYRRHFAGIPSGLFTTQLLDSWYNYTMLATILSALGFDPKHCIIKVQGDDSIIKLSALIPEESHQSFMDAIVRLADYYFKSVVNVNKSEVANTLNGREVLSYRNHNGLPHRDEIAMLAQFYHTKARDPTPEITMAQAIGFAYASCGNHHRVLSVLKDVYLYYKDLGYTPNRAGLSLTFGESPDLVLPEIPLDHFPTTILNRRILPISTYDLWQVHSNARIR

SEQ ID NO: 1098 - protein, 596 aa, Poaceae Liege partitivirus 11
MDYLVSALNRISHWFLKQTNFELVGTYSLPPGILRTNDVAIANHKKTLEHAFHKYLYDREIDYITKEHRRSEINYDSILIDFFSGDVEHFEIPFDQNVEYGLHCMADAFRPPRPCRPAHILDVKHHYPYKWNVNAEPPFSTDPFFLNSRDTFGEFIRKHEYEYIDKEDFFRRHPNQESHEFLKTVVPPKFGYLKSVVFSWTRRWHHIIKDGFTDKTDLRDSGYFYNRFIFPMLLHTKTAIVKKDDPDKMRTIWGASKPWIIAETMLYWEYIAWIKLNPGVTPMLWGFETFTGGWFRLNHTLFCGLIRKSFLTLDWSRFDKRAYFPLILKIMQITRTFLTFDEGYVPTYAAPTHVQWNEEKSKRLDRLWMWTLENLFEAPIILPDGRMYKRHFAGIPSGLFTTQLLDSWYNYTMLATILSALGFEPKHCIIKVQGDDSIIRLNLLIPSDKHQSFMDALVEKALYYFNAIINVKKSEVRNSLNGCEVLSYRNHNGLPHRDEILMLAQFYHTKARDPTPEITMAQAIGFAYASCGNHRRVLHVLEDVYNYYKDLGYTPNRAGLTLTFGESPDLSLPDMPLDHFPTTAEIRRYLVCSRYA

SEQ ID NO: 1099 - protein, 716 aa, Poaceae Liege partitivirus 13
MVLTTIRDYLHEAQLRIKKEWQTYQSNHETSGYSADRPTDYDLRRYYDSARNYDAEFHRTTEYEHNFLQTYERYTNANIQRNEPFEFYRNLTDNELPKDRHPQPGLTVLPFRYHTGQIVHTTDDLPESGFTLHPLISHLLERKWYHYKQYTDKYCRPLGTTNATFNDFNREQKHIAPIDPDRKNTVLKLVTTILNGLPYLPLHFVDTRFCNTPKSTGTGYFQRFSTFFRTHAYYARNPIYALRPTSKGYFFNTLYEYSRTWMHHIKEYGYPFVPSDNQQDNIRQLRIFFQKHVTMLFTRNHISDRDGNLKQRPVYAADDFLIMCELMTTFPLHVMARYPINGIKSAIMFSFETIRGSNHYLDSLAKNFQSFFTIDWSSFDQRVPRIITDLFFTDYLRNLIIINHGYQPTYEYPTYPDLTEHDLYHRMSNLLHFMHTWYNNMVYVTADGFAYLRSTAGVPSGILNTQYLDSFANAFLLTYGLLEYGYSPSQILEITFFILGDDNSGFTHFSHHELTEFLDFFEKFALLRFNMVLSKTKSVITIMRNKIETLSYTCNFGKPRRPLGKLVAQLCYPEHGPKDKYMSARAIGIAYAAAGMDPEFHEFCYDVYHTFLPYAAPINDHTLDMAQKHLPGYFRVLDSLSHEIPFDHFPTIEEVLHKYSSWQGYLAPQPKWNTAHFINLPHIIPPDAKTMTDYELERNIQRPTVLDCFQDFTLVI

SEQ ID NO: 1100 - protein, 480 aa, Poaceae Liege partitivirus 14
MSKCTHNITDYEFVNFRGDLEDLHQTHSEQVNREEEVIHHDEFALAELQAIKPELYDQFVNNWSRSWYTKKHHMDTILNYAHKDIPVELTDMNKWIESIRIVRDRLRSLPKVRALSVKHELDQVKYVQQSSAGYGYHGVKGPIKGLNHMRAIKRALATLYSATAEDGEGIEHAIRESVPDVGYTRTQLTDLTEKTKVRSVWGRAFHYILLEGTAARPLLEAIAATDHFIVIGQDPIVSVPQILSRTREHSRWLTAIDWSSFDATVNRFEINTAFNLIKEMIQFPDLDTEMAFELSRQLFIHKKIAAPDGKIYWSHKGIPSGSYYTTLVGSIVNRLRIEYLWRIKFNQSPSSCYVLGDDSLIGFDQFFKPDEMQELVSHLGWFINSNKTECSTHVGGVSFLGRTSRGHYNERDLKKCLRLLILPEYPVTSGAISAFRAQSIAQDAGGSGEYLNRIAERLKRHHGIAEQEAIPKYFRKYQFL

SEQ ID NO: 1101 - protein, 467 aa, Poaceae Liege partitivirus 15
MAGGLALVGSGSRRRAREEFQIIHDRWSYEMVKEYASPGDMQEIDGWARSFYTLEGHLASIRAYDKPLLPQPDDSVWTDVKAEMLNMFSNFETVISLPFETGLDSVRFESSSAAGHGYSGKKGEHDNLKRAKGIANAAIRTYAEMIEQHGINYANDDITSNSTPDIALTRTQLAKLPSIKVRNVFGEAFHYILIEGLSAFPLLEVFKRGDTFYFIGKDPTLEVPYMLESMERRTQWYSIVDWSNFDASVQNWEIDHAFNCLRQMIHFPSRLSELSFEYSIVLFKKRKILSPDGQLYMRDSGIPSGSYFTNMVGSIINYARINFIMKKLNYPVLKIITQGDDSITFIGNTQRPDPSEFSRISERYNWTVKPEKCIITDSPDDVVFLGRSSLHRYNVRDRLKALRLLCYPEFEVEDPKISTARAHAIQRDAGYNDPIFDTIYCALYQMYGEAQDVPYHLLPYFERDLFM

SEQ ID NO: 1102 - protein, 579 aa, Poaceae Liege partitivirus 3
MRNTVQIGFKPSLARELRGNPDPGSNPAYGKTVDYALRRHLSEDEFETVVNRFRRSPWNNEALNADIEKLDCEEHHVIKDEHYYRAIEKTRTLFSPDKKLKPVHFADLRHYPWQLSSNIGAPFATSEHWQSYVNEKYSGNFTDSFSRDLFKEAHGTSLDPVMIDRRMTKRNLYNEMFLINRKNIHLIKDGWTTNSSGHDLKYWNTAFARQHLVEENDPDKVRLVFGAPSTLLMAELMFIWPLQVSLLARGSESPMLWGFETLTGGWSRLYNWATTVDPQFNTVLTLDWSRFDKEARHTVIRDIHSMIMRPMFDFNNGYQPTIFYPETPDTDPQRLENLWNWMTDAVLTIPLLLPDGKLLRFQHSGIYSGYFQTQILDSMYNCVMIYTILSKMGFDIDRIHVKVQGDDSLVLLPHSYIALRDTFLPFFSSTALKYFGSTVNIKKSEILPSLENAEVLRYRNHGTMPFRDELQLLAMLRHPERTASLQSLMARCIGVAYANCGTHTRVHQICEDIYSYLASAGFTPDPLGLPGGLRYKQNYVPSYTQIDLDHFPSFYETICHLQDPAREILTGKHWPCSHF

SEQ ID NO: 1103 - protein, 459 aa, Poaceae Liege partitivirus 4
MAGNNNNINGHNFRDFEREFSFLYSGHPFVIRREQEVTYHDEYALKVLQSRYPEYYDQFIKGWSRSFYQGAAHMKSIMQYDSPNHSAQDINDDSYQRAVTHVVERLSSLPIVRAFDVKTELDLIKFESSSAAGYNYSGHKGEVDGLNHNKAIRQAKAILWASYNPAEGIDHVIREMTPDVGYTRTQLADINEKTKVRGVWGRAFHYILLEGTSANPLLNAFTTVPTFVHIGPDPTISVPILLSNTSKECKWLYAVDWSSFDASVNRFEIHAAFDILKTHIDFPNQETEQAFEISRQLFIHKKIAAPDGNVYWSHKGIPSGSYYTSLVGSIVNMLRITYLWYELLGRPPKVSFVQGDDSLNGDDEKINPINLARIAAPAGWKLHPDKTEISRYPEGVTFLGRTSSGGMNIRDLKRCLRLLILPEYPVPSGAISAYRAHSIAQDAGGRSVILNEIARALGR

SEQ ID NO: 1104 - protein, 478 aa, Poaceae Liege partitivirus 5
MDHSFRNIRDGLTVIGEVRTRGSRDEFNLIVDPYALEAIKAVAKAPVLFALQGWSRSYYTLDAHVKAIEAYNLPKLPEPTDTVWNQTKQYVSDLFKRFNTVECSSYKDFDSVKWIASSSAGYGYTGHKGDHENYRIAKRTAVTISEMLNHNPNYVAEAVEQSTPDVAFTRTQLCQVKVKTKVRNVWGEAFHYVLLEGLFAQPLVEYFMTIDSFYFIGRDPLFAVPALIEDLLSKKDYIYMFDWTAFDASVQEWEIRFAFQLLESILKFPSTVESHIWHFIIELFIYRKIAAPNGTLYLKTQGIPSGSCFTNIIGSIVNFVRLQYMFKKMTNQFVIAYTHGDDSLVGIDSAQFVHFKQLEAIAAQFNWNLSAAKSSFSRRAEGTTFLSRTVREGQNTREDLTCLRMLLFPEFPVQSGALSALRAKSIFHDAGSNSETLLAVYLYLKTKYGVADDLPDEFKAWNLIEYEARKVSYSTYVM

SEQ ID NO: 1105 - protein, 586 aa, Poaceae Liege partitivirus 6
MKNIEKLGSVPSLAKPIRGNVDPLANLNYGKIIDHALQRFLTHEEFLKVTTGYRRSPWSESALDTDLEKLDCDSFDVLKDCHYYAAIEHTRKLFQPKALLRPVHFADLRLYPWKLSTSVGAPFATSKEWNQYVNEKFDKGFTKPYYRDLFAEAHGESLLPTMIDRRMTKRNLYNEMFFINRKNIHMIKDGKTTNEHGHDLRYWNTAFARQHLVLAEDEDKVRLVFGAPSTLLMAELTFIWPLQASLLDRGEESPLLWGYETTTGGWSRIYRWAHAVMPRYNFVATLDWKRFDREARHTVISDIHSLIMRPLFDFSHGYHPTIYYPDSSEADPTRIENLWNWMTNATLTTPLMLPNGDLLKFNHSGIYSGYFQTQILDSMYNCVMIFTILSKMGFDLEKVAIKVQGDDSIFLMPHDFNYLKGSFLQFFSYYARTYFGSTLNMEKSEILPSLEGAEILKYRNHGTMPYRDELQLLAMLRHPERTVSLSALMARSIGIAYANCGNSTRVYHICEDIYNFLLKGGYSPDPHGLPGGLRYRQDYVPSSAEVDISHFPTYHETVRLLQEPSRPLLTEQHWPVQHFLGVPGKS

SEQ ID NO: 1106 - protein, 629 aa, Poaceae Liege partitivirus 7
MLWCVEQKILPSPGSPHPFGLTKLKNSRPNRIFCSTHHNMRNTVQVGFKPSLARELRGNPDPGSNPAYGNTVDHALRQHLNDDEFDTVVNRFRRSPWNVDALNDDIEKLDCEEHQVIKDEHYYRAIEKTRQLFTPEKKLKPVHFADLRHYPWQLSSNIGAPFATSEKWQKYVSDKFSGTFDDAFSRDLFYEAHQVSLEPKMIDRRMTKRNLYNEMFLINRKNIHLIKDGKTTTATGHNLKYWNTAFARQHLVEENDPDKVRLVFGAPSTLLMAELMFIWPLQVSLLARGPQSPLLWGYETLTGGWSRLYNWATSVDPRFGTVLTLDWSRFDKEARHTVIRDIHSLIMRPMFDFTNGYQPTIFYPETPDTDPRRLENLWNWMTDSVLTIPLLLPDGRELQFQHSGIYSGYFQTQILDSMYNCVMIFTILSKMGFDLDRVHVKVQGDDSIVLLPQHYTLLKDTFLPFFSDYARQYFGSTVNDKKSEILPSLEGAEVLRYRNHGTMPYRDELQLLAMLRHPERTSSLPSLMARCVGVAYANCGTHPRVHQICEDIFQYLASAGFTPDPLGLPGGLRYKQNYIPSYTQIDVSRFPSYFDTVCHLQDPAREILTDIILPNSKILGKRRRLWYTQ

SEQ ID NO: 1107 - protein, 480 aa, Poaceae Liege partitivirus 8
MAGNNNNINGYDFTEYQDEFQILYSGHPHVIRREQGVTYHDQYALKELQARYPEYYSQFIEGWSRSFYLGSKHMESIRQYDSPNRTAQDMNVSSYKKAYLHVQERLRSLPIVRAFDVLSELDLVKFESTSAAGYNYSGPKGEVGGENHNKAIRRAKAILWASYNPEEGIDHVIKEMTPDVGYTRTQLADINEKTKVRGVWGRAFHYILLEGTSAHPLLNAFTESETFVHIGPDPTLSVPQLLSHIAKYCGWIYAIDWSSFDASVNRFEINAAFDLIKEHIFFPNQETEQAFEISRQLFIHKKIAAPDGNVYWTHKGIPSGSYYTSMIGSIVNMLRISYLWYELLGRPPKICYVQGDDSISGDDERINPIHLAQLSEPIGWKLHPEKTEISRYPEGVTFLGRTSSGGMNIRDLKRCIRLLILPEYPVPSGSISAYRAHSIAKDAGGRSVILNEIARAIAHKYGRAPISGVPKHFILYRFAV

SEQ ID NO: 1108 - protein, 632 aa, Poaceae Liege partitivirus 9
MGYRKSLVRSPSKPNLPRAPNFTQSSPPAHPLAMDLHHKALRALNIDPEKDPGLVHIYSEKPAPPFSGHPYYKENYQDLVLDALNSTLYAEDLDTVINGYYRSPMTIEAQYEDMMKMNQPPVHIVQDDAFNTAFALTMKAFAPTEKVRVVHYVRTKHYPWPLSSSVERPFSVDPTVRKYVKEKCIAREIVDEKMSFHNTFEYVYNALRHPVHRIKNGECFTGDLTKDFLYPITAHFRPGLGKPGSTAIKNRLVWGVSKLFLIAECMFMYPLFDNYLRHGTTPMLWHYETILGGSTKLHNEVTPQISRTQVTVITADWSEFDRRVPFELIEMVINASLEYYDLGYYAPDYLYDTRSSCKYDIPRILNLFKWTIYATLSSPLLMPDGRVWMRTRNGVPSGMFRTQWLDSIINGIMITTILLDAGFKVNEKFILKVLGDDSLSILFHYVAPAQHENLKLALAESARIRFNAKLSLEKTEVSNSMYGMELLGYRSKNGAAYRDPLKLLAQLLYPESEAPTFESLMGRCVGIAYADLGRTKILQTVCKKIFDRLSAEGYRPDPRHVHRFLSGSKFVESRLEISHGKFPTPLEIQRWLRVPYKRTMRDNDHYWPPEIFKPSFKDDLETVLIGLSRLIL

SEQ ID NO: 1109 - protein, 274 aa, Podosphaera partitivirus ptbx-09
HAPNINYPDTSSDWSDHKSLRIENLWMWCLENLFTAPIVLPDGRMYIRHFAGIPSGLYITQLLDSWYNYTILATTLSAMGINPNECIIKVQGDDSVTRLCTLIPPEDHDVFLQQFQDLAHHYFAAEVAFDKSEVRNHLNGVEVLSYRNNHGLPFRDEISMLAQFYHTKARNPTESITMAQAIGFAYASCGNNERVLLVLKDVHDYYARLGFTPNPAGLTLVFGNSPDRASLNISLSRFPTVHEIKKYLISFKYRNKNQDHLTWPLDYFISSPCT

SEQ ID NO: 1110 - protein, 575 aa, Podosphaera prunicola partitivirus 1
MCFSKITNLERLGKKPVNRRLRRQHDRVSKRTQLFTQRATRKAIYKTCPPQIAEQAINGYYRSPTDPAAAEEDFLKTDQPYIDVPRDYHYLRALRAVEKMFRPSRRLRPIAFPDLRYYPWSLNTSAEAPYRESDEWYEYVKQKHREQEVDDERISFHNLYDELFNKNRGLIHLIKEGKQPFWDSDGNPVPYEFTYLHSRAHMVSSDRPPRIRAVFGVPKLLLMAENMFIWNLQKEYLNRRVNRGPLLWGYETFRGGWTHLVQRLCGKQINSIISADWSGFDHNALHEVIDDIHQMWRRWFDFDSGYEPSISNNHDYSDTETDEIRIQRLWDWMCYSIKRTPIKAESGNMYRWKFNGFASGFQQTQLLGSFINATYILTSLSACGINIDSDHFQALFQGDDSITTFPERVDFKTFIPKVSNEAKRRFNANLSIDKTTYGDWFDGIEVLSYAYRGGFAVRDPASLLAHLLYPERPKRPEELAASCIGIAQASMGIRCVYDACLDLFTFLVEELKIEPYFPETDLNRPFKWWEPTFRYFPTFEECFLQNFEDAFRDQSVKNRLWPTQPVGNGFCFLLP

SEQ ID NO: 1111 - protein, 584 aa, Podosphaera prunicola partitivirus 2
MAPTNLLRLEKIPQRSRYNEPLFRNFRTNRVRQGIIKRAIYKICPLKLARKVIYGYRRSEGGDELAETDFQRSDVPYFDLKRDYHYQRALRVCEKLFRPSRTLYPIAFPDLRFYPWTLSVSAEAPFSIEKKWLTSIRTRQSEGEDLDGRLTFHNLYNEIFELNRNLIHQIKEGDKSFWNEDGTPRPYWYNTLHTRSHMVQSNEPDKLRAVFGVPKLLLMAENMFIWNLQKEYLNQKVQSPLLWGFETFKGGWLKLWNRMYSKKCSTFLSADWSGFDRFALFECIDDVHNMWRNWFDFTQYEPTRAESGPPGIQLSYPHSKTNPSKIENLWQWMCYSIKFTPIKGQSGQLYQWQYNGIASGYQQTQLIGSFVNSIYILTCLSDLGINIESDNFQLFVQGDDSLTGLPEIIANEDIPNFLERLAKVAKQRFNANLSVAKTAAGESLSDVEVLSYHNKCGIAYRDEAELLAHLLYPERFQTLEATVSCCIGIAYASMGCSRLVYDTCRDAYKFLTTQLKVEPDLKFLQDFFRVRGSPLTDDYRAPRFPTFDECFHQNFEVRSRSESEKQRLWPTNPSGDYGFHFINE

SEQ ID NO: 1112 - protein, 619 aa, Podosphaera prunicola partitivirus 3
MDYLTDAFNRITEFFNNDKNLELVGTYHYRPAPPAVHPEHVIAHKRTVLHAMQRFLFPREITYITDELRRSDVTLEAILDDFFANDVPDHKIPFDEHVENGLNAMADAFRPPKLARPCHINDVEHHYPYKWNVNAEPPFSTDKYFLSNRHLFGDFYNSTNNTWDKYIDPLDMERRYSHRIEKVLNQVTPPKFGFMKNAVFSWTRRWHHVIKDGFTNTAGLDSSVYLRDRYIFPMLLHTKTAIVKKDDPNKMRTIWGCSKVWIIADTMLWWEYVAWAKLNTGASPMLWGYETFTGGWLRLNAALMSSYYRHSFLTIDWKRFDKRAYFPLIQRIMEKTRTFLDFTQGYVPNVNYPDTSKDWSINKAMRIENLWMWCLENLFTAPIVLPDGRMYKRHFAGIPSGLYITQLLDSWYNYTILATILSAMGINPRQCIIKVQGDDSITRINTLVPPEDHDVFLQQFQDLASYYFASEVSFDKSEIRNHLNGVEVLSYRNNHGMPFRDEISMLAQFYHTKARNPTESITMAQAIGFAYASCGNHERVLLVLKDVHDYYSDLGFTPNPAGLTLVFGNSPDRAALNIPLNKFPTVHEIKKYLTSFKYRNKVQDHLTWPLEYFVSPPCT

SEQ ID NO: 1113 - protein, 713 aa, Podosphaera prunicola partitivirus 4
MSIHKLRSYLAERKERIKFEWQRFQASRDGTSPPPSLTDSDIRRHFENQRDRQLEFDAHRALEHEFDALKHTMHLQNDTKHENFEFTSTQGFTSFPENRSPAPGIIGVPKQFHSGQTVNVTEQLPETGFQVHPLIRQLLRNKYPLYEYYVDKYVRPLGTTDATFTDFNRQQVGTAPIPDFRKERILNHMFKRLNATPYLPLHFVDTQYAKLPLHTGTGYFNRHSFKTRAHAKYSHPPEYAQKQTSKGYFYNAFYETARTTIHRIKETGLPFTFEFRDDKTDDENFISLASALNAFFDSHATMLFTRNHISERDGILKQRPVYAVDDLFLLMEVMLTFPLLVMARKPESCIMYGLETIRGAMHYIDRLARQYDSFFTIDWSQYDQRIPRSITDIYYTDFLERLIVINGGYQPTYEYPTYPDLTDESTFIKMDNLLHFLHTWYNNMTFVTADGFGYRRTTAGVPSGLYNTQYLDSFGNLFLIIDGFIEYGYSDVQIDDILLFIMGDDNSGFTHIPIFELEKFLTWFETYAYSRYNMVLSKTKSVITDIRGKIEMLGYQANYGNPLRPIGKLIAQLCYPERGPKDKYMSYRAIGIVYASAGQDVEFYNFCKDIYHTFLPYAAPAEEIKLSQFHSYFPGYLRALDTPDEFFNIDHFPRLWEIRDIYSRYAGPLNYSPKWNEAHFINDPNVIPPSAVTMAEYRVTHQIPRRPVLNVTP

SEQ ID NO: 1114 - protein, 581 aa, Polygonatum partitivirus 1
MQNLHVIGHIDRPKAIKTKDYHNPQYKGIVFNAFKKHLTSEEIEQVVTGYRRSTWSDEAFASNLEYINVSEHKVIKDEHYESALSEMNRRFSPKSKLKPVHYADLRLYPWRLSTNVGAPYNISEKWIQHINAKFNSGLIDNNRMSKHNLYNEFFVNNRYLFHRIKDGHTTDGYDNDLKYWNTAFARLHLVHRDDPDKVRLVFGAPTLLLQAEMAFIWPIQVSLLNRGIHSSPMLWGYETITGGWNRLNTWFTHHHPRLTTYFAFDWSRFDQQARHTVIDDIHEVWRTWFDFSSGYCPTTIYPETNPEPERLENLWQWMCSAVKKTPLLLPNGDLVEFRHSGIFSGFLQTQILDSCYNMVMIFTVLSRMGYDLSKIALKVEGDDSIGGILNTIPPYLYQSFLETFASYAKDYFGSTLNEKKSEISHTLEGMTVLKYRNHGCVPIRRWDELLAMLYHPERSQALPNLMARAVGIAYANCGMSTKVYRICEDIFNYLRALDISPNPKGLPGIFQFDEFFRPSAIPDDETGFAPIPIRKEIKSLLDIDLSHFPTYFETIHLLMNDDRTLLTDRHWLSTFFLEIPL

SEQ ID NO: 1115 - protein, 479 aa, Polygonatum partitivirus 2
MEKPNYIGYDFKDFQQELEDLDQTHPNVIRRESGVTYRDEFALLELQSISERHYEQVLEGWSRSYYLPEKHLEAILAYSMPNIPSNYVNQKMYAQCIDVVIEGLRSLPSVRAFDVLTELDQVSFKSSTAAGYGYIGAKGAPGDLNHRRAIARAKAVMWSAINPKGEGIDHVLSTAVPDVGYTRTQLTEITVKTKVRSVWGRAFHYILLEGLFADPLLKSFIETETFYHIGQDPTHSVPNILSILSEQCKWKYAIDWKQFDATVSRFEIHAAFDILQSKLIFPNDETRQTFEICRQLFIHKKIAAPDGKVYWAHHGIPSGSYFTSIVGSIINRLRIEYLWRTITGHGPKICYTQGDDSLCGDDILIPPEKFAEVANLIGWYFNPDKTEYSVAAEAVSFLGRTYHGGMNERDLIKCLRLLIFPEYPVQSGRISAYRARSIAEDAGGISDLLNRIALRLKRQHGVASEEEVPSYFKLYVLNM

SEQ ID NO: 1116 - protein, 450 aa, Praha partiti-like virus 1
MFVRFYACCRRVRELDDVPEKPTVRRTLKLHFDDLKNFLRRHPSRPSDFQFQVHPTFRNMKVKPWHLLDTLPEITRHTSPGLLWKKLGYKTKGMVIDSKEGVNMLHSINHKYKTQSNVQMPACLVVPTSCTSPDGSKVRLIWSFPIDITVSEAMFGIPIIKALPVDYVPSPETHHDTFCGTGAKSFDFSRFDGTVPRWLIEEAFKHVWNMIDTSSYAATPSTPYECKPYSRNSLKVLFNRLKHYFIHTPFRVKPDGHVFHKHEGVPSGSYFTNIIDTLCSYAIMRYIHDIDCSSQDVTYGDDCHTTYCSCDNGTLQKRAKDLGFTLKIEEPNSHGCLTYCKVECHRGKRFIPGQSFRNILENCDQHYRSDVAVCMVLRATTRRQASAMVAEVRTPVSSRPPHWVRKMLARGQKYAHPDPVIDPVDPFDTEVILECLPGWVREIYYGGYRT

SEQ ID NO: 1117 - protein, 275 aa, Pseudogymnoascus destructans partitivirus
EFDRTMYENIYGYTRKPEGPQGMYKSLLKFSEDKSTFHSLNRVQRRAMIGAIKKARTAFKLPWKREPLDWHEVGQFLRRDTAAGATFMGKKKGDVMEEIYHEARWLGHRMKQDGREKFNPKKMRFPPCLAGQRGHMSERDTPKTRLVWVYPAEMLCVEGFYAPQMYRDFMNDRHTPMLNGKSSQRLYTEWCVGLREGEKLYGLDFSSFDSKVPSWLIRVAFDILRQNIEWSTFRGEKVSKREAQKWRNVWDAMVYYFINTPMLMPDGRMFRKRRG

SEQ ID NO: 1118 - protein, 539 aa, Pseudogymnoascus destructans partitivirus 1-pa
MEVSPFDPTPLDNVIEGSPLVDDSLLVPSSRTRGSSYDVIPEHFNSPGLTEIARYGGYPVYSGGSNTDAWVRTSLKEFDRTMYENIYGYTRKPEGPQGMYKSLLKFSEDKSTFHSLNRVQRRAMIGAIKKARTAFKLPWKREPLDWHEVGQFLRRDTAAGATFMGKKKGDVMEEIYHEARWLGHRMKQDGREKFNPKKMRFPPCLAGQRGHMSERDTPKTRLVWVYPAEMLCVEGFYAPQMYRDFMNDRHTPMLNGKSSQRLYTEWCVGLREGEKLYGLDFSSFDSKVPSWLIRVAFDILRQNIEWSTFRGEKVSKREAQKWRNVWDAMVYYFINTPMLMPDGRMFRKRRGVPSGSWWTQMIDSVVNYILVDYLTQCQTCQIRGLRVLGDDSAFRSCHDFSLDQASADAAAVLMILNPDKCEVTLDPTKFKLLGTTYEDGHPHRETIDWFKFALYPESSVSSIDVSLTRLVGLWLGGGMWDLHFCKFMDYFQTCFPCPLEGWFSKDQRRWLEVIFSGKAPRGWTTKKSLFWHSIFYTYC

SEQ ID NO: 1119 - protein, 539 aa, Pseudogymnoascus destructans partitivirus-pa; identical to SEQ ID NO: 1118

SEQ ID NO: 1120 - protein, 509 aa, Puddy partiti-like virus
MILENYQKDLQLFRRNRYRSKRLKSYFARFSKDDNTILIDPYVRDVLLAQGISVEESPRSIYSVEKLFEALSHYAPGKIPKPKPCAEFTAGVALAYKCFARKRDQLQLHILPMTPETIVYITSNPSGSPGVTNFGCTKAESQTRALERGIQTVQGEKKPEPCLAFKRTQFNEKTRLVWGYPYSMTFIEGLVAKPLLEQFKGGCSPMAFAMSTGALGTKLRVASYHKEWAYSLDMSQYDATISAQLIHIAFKILRTWFDEAEVEPVSGKTVGQIFNLIEKYFIHTPIIMPDGNVYYGKEHGVPSGSYFTQLVDSIVNVIIGGTISAKFNMHVSRREIFVLGDDLLMWSNRLMDLDVIAKYANEQFGVRLHGSEKSKRFHYDETIHYLGRDWTNGLPDLPEEEIVKRMVYPESFRKYAKDPDDRKRQVHMMLLAYAGTYRSAWRIAYRAIDSSDRNVHRGCGNTDVNVYIREGRKVELTPEHMSGLMRFLFREHMFGDTGDIPITAIQYWL

SEQ ID NO: 1121 - protein, 573 aa, Radish yellow edge virus
MSNLEYLGLDHHWPAIPRFAKSPNDWYFACQQLVRSSICLYSSLLGSNDTDTVLNGYYRSHADEDTAEQFFMRYDVEPFDIIKDNYYSQAFDTVTEWFRPSAPIHPVHFTDVRWYPWEISTSAERPFTHDPLLKKKVQLSKQLGLLDNARMSFHNCYNDIFTYCRHYTHEVKDVRPVTLHHIDLHVKPALVRSGEPPKIRTVFGVPKSLIFAEAMFSWPLFSDYFTNSETPLLWNYETLNGGWYRLNDEFYQQWQSFCTIFNLDWSEFDMRVYFSMLDDCRDAVKSYFCFCGNYCPTRTNPTCRTNPQRLQNLWNWIGTAYKDTPCTTTTGKVYRRRFAGMPSGIFCTQFWDSFYNCIMVVTTLEALGFRITDRYFLKVLGDVVIFGILKHIPISKSADFLQDFSTEARRRFNSKLNSKKCGASSGIHGAQVLSYINWNGYPKRDSNQLLAQLLHPKSLRDTYPRLMARAIGIYYASCGDPKIRPICNHIYSELKYAGFTPSSTGLHGLFDPNASIGFIELDHFPSENEVTCRLHRKSKRSAELQALYWPRDHFLEEAGSSRNCPLFFQVETI

SEQ ID NO: 1122 - protein, 573 aa, Raphanus sativus cryptic virus 1
MSNLEYLGLDHHWPAIPRFAKSPNDWYFACQQLVRSSICLYSSLLGSNDTDTVLNGYYRSHADEDTAEQFFMRYDVEPFDIIKDNYYSQAFDTVTEWFRPSAPIHPVHFTDVRWYPWKISTSAERPFTHDPLLKKKVQLSKQLGLLDNARMSFHNCYNDIFTYCRHYTHEVKDARPVTLHHIDLHVKPALVRSGEPPKIRTVFGVPKSLIFAEAMFFWPLFSDYFTNSETPLLWNYETLNGGWYRLNDEFYQQWQSFCTIFNLDWSEFDMRVYFSMLDDCRDAVKSYFCFCGNYCPTRTYPTCRTNPQRLQNLWNWIGTAYKDTPCTTTTGKVYRRRFAGMPSGIFCTQFWDSFYNCIMVVTTLEALGFRITDRYFLKVLGDDVIFGILKHIPISKWADFLQDFSTEARRRFNSKLNSKKCGASSGIHGAQVLSYINWNGYPKRDSNQLLAQLLHPKSLRDTYPRLMARAIGIYYASCGDPKIRPICNHIYSELKYAGFTPSSTGLHGLFDPNASIGFIELDHFPSENEVTCRLHRKSKRSAELQALYWPRDHFLEEAGSSRNCPLSFQVETI

SEQ ID NO: 1123 - protein, 477 aa, Raphanus sativus cryptic virus 2; identical to SEQ ID NO: 595

SEQ ID NO: 1124 - protein, 481 aa, Raphanus sativus cryptic virus 3; identical to SEQ ID NO: 598

SEQ ID NO: 1125 - protein, 616 aa, Raphanus sativus cryptic virus 4
MDYLTSAFDRITHWFTRPTNLEYIGNFTLPPGILRVNSTAIINHQKTLDFAFNKYLYPHEIHQITKEFRRSDIELDAILDDFFSGDVDPFEIPFDEHVEYGLTCMADAFRPPRLCRPVHILDVKHGYPYKWNVNSEPPFSTDEYFLSQRKTFGEFIQMHEYEHIDKADFFRRHPNHESHDLLRTIVPPKFGYMKSMIFSWTRRWHHIIKSGFTESTGLRTTGYFYNRFIFPMLLHTKTAIVKFEDPNKMRTIWGASKPWIIAETMLYWEYIAWIKLNPGITPMLWGYETFTGGWFRLNHLLYCGLIKRSFLTLDWSRFDKRAYFPLILRIMQTVRTFFTFEEGYVPTHAAPYHPQWSPTNSQRLENLWLWTLENLFEAPIILPDGRMYRRHFAGIPSGLFTTQLLDSWYNYTMLATILSSLGFNPKFCIIKVQGDDSIVRLGALIPNEAHTSFMERLIYLAGYYFNSVVNVKKSEISNSLNGREVLSYRNHNGFPHRDEIAMLAQFYHTKARDPTPEITMAQAIGFAYASCGNHKRVLWVLKDVYNYYKDLGYTPNRAGLTVTFGNSPDLVMPEIPLDHFPTVNEIRRYYTNSDFSNEAQKAKTWPXTLFINAPGE

SEQ ID NO: 1126 - protein, 585 aa, Raphanus sativus partitivirus 1
MKNTLQIGYLPNLARPIHGDSDPGRNPAYQTTVDHALRRFLTLEEFETVTSGYRRSPWNEDALNSDIEKLDSDYHSVSKDSHYYKAIEHTRKLFTPREKLKPVHFNDLRHYPWQLSTSIGAPFATSDKWKNCVNQKYDGTLKTQEFRDLFRDAHGISLEPRMIDRRLSKRNLYNEMFFINRINIHRIKDGWTTNQNGHDLKYWHTAHARQHLVEANENDKVRLVFGAPSTLLMAELMFIWPIQTSLLARGEESPMLWGFETTTGGWSRLYSWAFTISPQFGSVATLDWSRFDKDTRHTVIQDIHRLIMRPMFDFNSGYHPTYGNPTTNPDSSRLENLWNWMTDAILSTPLLLPDGRLLKFQHSGIYSGYFQTQILVSIYNCVMIFTVLSRIGFDLNSVALKVQGDDSIILLNHHYNYLRPSFLQMFAIYASEYFGSKLNEKKSELLPTLENAEVLRYRNHGMMPFRDELQLLAMLRHPERTASLNALMARCIGIAYANCGNSTRVYKICEDIYYYLKGIGITPDAFGLPGGLRFRKNYLPSYEEVDITHFPSWLETVEHLMDPKRPLLTNKHWPETHFIGIPGKS

SEQ ID NO: 1127 - protein, 616 aa, Red clover cryptic virus 1
MDYFISAFNRITHWFTTPTNFEYVGNYSLPPGLLRVNDVAIANHKKTLEHSFNKYLYSHEIKLITKEYRRSPIDEDSILEDFFSGDFEYFEIPFDYHVEYGIQCMADAFRPPRLCRPVHILDVKHGYPYKWNVNAEPPFSTDEYFLSQRKTFGEFIRMHEYEHIDKDDFFRRHPNSESHDLLRTIVPPKFGYLKSMIFSWTRRWHHIIKSGFTESTGLETNGYFYNRFIFPMLLHTKTAIVKKNDPNKMRTIWGASKPWIIAETMLYWEYIAWVKLNPGVTPMLWGYETFTGGWFRLNNELFCGLIKKSFLTLDWSRFDKRAYFPLLRKILHTTRTFLTFDEGYVPTFAAPTHPQWNQEKAHRLDRLWIWTLENLFEAPIILPDGRMYKRHFAGIPSGLFITQLLDSWYNYTMLATILSALHFDPKHCIIKVQGDDSILRLTTLIPVDQHANFMSHVVRLASHYFNSIVNVKKSEVANTLNGREVLSYRNHNGLPHRDEITMLAQFYHTKARDPTPEITMAQAIGFAYASCANHNRVLWVLHDIYNYYHDLGYRPNRAGLTLTFGDSPDLFVPEISLDHFPTKSEIRRYLTALHYQNEAQNARTWPRTLFINAPGE

SEQ ID NO: 1128 - protein, 569 aa, Red panda associated partiti-like virus
MATMLETAFKKAKVFPSVKDACKGLDTPWETSDFEAMKGVIERMSRKYTLTDPDQVLDKRLYNLTCAMLRESAATKPDNVEILGLLEKAVESKRLTKRFQDPSVTRASFQDFLSPSKASALWKREVKGAMATVESSLNIVTLEPIRVTEDTEFNELFSNDKASAGFFSPGSKKSSKSREILHQVQQFQFEIENDIKPREPYPCIAFKRCQMSKMANGKTLTLHTIKYKQRFVWGYSSDMTGIEATVARPIINHFVKNVPWYAGGQSLEQIRAMIKSNRKTYDYWYSIDYSKYDSTVPNWLISAAFSIIKKFYIGNRLALETLDYVEDFFINTTVVLPDGGVYKKSKGIPSGSYFTQIIGSLCNAIMVNAYFQRAERVEKDFLLGNSAVVRRGLVQQHSQTSCSIMGDDNLFFTHKPVDMVEFADYLKRTFGVVIHPDKCAKGVSQKDDPEYLKRHWALEGAYRDALETLINMLYPEQWRKYDTYDPIMIIWSYWLGYPLTFDGLFEIEKTLEYSEDALKALEKSDSWVPSAALPSGMVVGQASTLVMKGSPMVKHWNEGYKRRLAVKQA

SEQ ID NO: 1129 - protein, 742 aa, Red panda associated partitivirus
MPFNTIRNYLAERLLRVKKEWQTYMKHDSDPEQTLQSYADSDFDRYRRALQFLPTLEEKRHMLQSEYDTLVSAMKIENETKHQPYELHQPVPSDLPYREDRLPAPGIRSVPLMYHSGHVIHADPATSRPLDPDFDTDAAESYIPGDIDFGPDIDPLLYNLIVTRYPCYLPAVNKYCRPAGTTDATFRDFNKPQKPSAPIDPARKEHVLSHVFRFLDATPFLPLHFVDTQYCKTPLVTGTGYHNRFSYKMKAHARYSRPDQYSDRPTSKGYFYNATYENARTLIHRIKSDGLPFNMHFFPEDRDPTDDEIQLYIDKCNDFFNDYPTLLFTRNHISQRDGTLKVRPVYAVDDLFIIIELMLTFPLLVQARKPSCCIMYGLETVRGSNHYLDALARSYSTFFTIDWSGYDQHLPRVITDLYYSDFLRRLIVISHGYQPTYDYPTYPDLDDHKLYERMDNLLHFLHLWYNNMTFLSVDGYAYRRTSCGVPSGLYNTQYLDSFGNIFLLVDAMIEFGFTDDEISSFVLFVLGDDNTALLPIDISRVHKFLTFLETYALSRYNMTLSLTKSVLTTLRSKIETLGYQCNHGNPLRDINKLAAQLVYPENGLKPHTMSARAVGIAYASAGSDPKFHSFCQDVYNIYRSHYRPDPRMTLSLRRHVYRDMEDILPELDSDTLPPFPSLYEIRSLYSQYAGPLSFAPKWNYAHFVNHPDVIPPSAKTMRDYELEHSLQVRQAPTFATVVSTQT

SEQ ID NO: 1130 - protein, 620 aa, Rhizoctonia fumigata partitivirus
MEYLVHAFKMFSLEPSVPQNLQMIGTYHYKPASPHVHTPHVEAHKKTVLKAMEKYLYPREINTIVNELRRSDVNLESILDDFFDNNVPLHRIPFDEHVEYGLQCMADAFRPPRPARPCHLNDVEHHYPYKWQVNAEAPFATDKYFLDNRHKFRDFYDETTGTWKHADPIDMERRYGNRLDTVLDQITPPKFGYMKNAIFAWTRRWHHIIKDGFTDLTGLVSSTYVRDRFIFPMLLHTKTAIVKKDDPNKMRTIWGCSKPWIIAETMLYWEYIAWVKLNPGITPMLWGYETFTGGWLRLNAALFSSLMKNSFVTLDWKRFDKRAYFELIYRIMLVARTFLDFENGYVPNVNYSATHTDWSHTKAQRIQRLWEWTLDNLFNAPIVLPNGDMYKRNWAGIPSGLFITQLLDSWYNYVMLATLLSALGHDPKACIIKVQGDDSVIRLAVLIPPQYHELFLTRLQDLADHYFGAVISIEKSEVRNELNGVEVLSYKHIHGMPYRDEIAMMAQLYHTKARNPEPSITMAQAVGFAYASCGNHDRVYYALKDIYEYYASQGFAPNPAGLTLVFGNSPDRFELDVPLDHFPTIHEIKKYLLNFEYRNEHQEHKTWPLDYFLNPPCSTL

SEQ ID NO: 1131 - protein, 596 aa, Rhizoctonia oryzae-sativae partitivirus 1
MFNNLIIGFKPSLAKAIKGNIQDNQVIEAYHHVVDHALYRFLPHSEAHEIIHGYRRSPWNEDALKKDIDRLNSIEHNVSKDEHYWKAISYVKKIFTPEVPLRPVHFADLRHYPWKLSTSIGAPFATSKEWNSYVVQKFHGYKEGFAESTFTKSYYRDLFAEAHKGQSLDPPMVDARMSKRNLYNEMFYTNRKHIHNIKDGRTTNDAGHDLRYWHTAFARQHLVKADEDDKVRLVFGAPSTSLMAELMFVWPVQSWLLSLKEKSPILWPYVTLTGGWHRFVNFASKFCPQFGLVLTVDWRGFDRYARHTVIRDIHSHILRPMFTFEHGYHPTQDYPNTEETDPQRLENLWNWMCDSILTTPLMLPDGTLIRFQHSGIFSGYFQTQLLDSVYNLIMLFTILSRLGFNLDDVYAKVQGDDSIILIVCCFLMVSNWLIEMFRYYAKFYFGAILNDKKTEVHPSLEHVEMLKYRNRGGMPYRDRIELLAQLRHPERAITYQALMARAVGIAYANCGSDPLVYQICEDIHQYLSKLGVKPDPAGLPSGVRFVQDYLPGQTTIDVQRFPSYFETCSHLLDGYEEQPSQGYWPRSHFIGIPGRA

SEQ ID NO: 1132 - protein, 596 aa, Rhizoctonia oryzae-sativae partitivirus 1
MFNNLIIGIKRSLAKAIKGNIQDNQVIEAYHHVVDHALYRFLPHSEAHEIIHGYRRSPWNEDALKKDIDRLNSPEHPVPKDEHYWKAISYVQKIFTHEVPLQPIHFADLRHYPWKLSTSIGAPFATSKEWNSYVVEKYHGYQQGFEESTFTKPYYRDLFSEVHKGQSLDPPMVDARMSKRNLYNEMFYINRKHIHNIKDGRTTNDAGHDLRYWHTAFARQHLVRAEDEDKVRLVFGAPSTSLMAELMFVWPIQAWLLSLSEKSPILWPYVTLTGGWHRFVNFASKYCPQFGLVLTVDWRGFDRYARHTVIRDIHSHILRPMFTFDRGYHPTKDYPNTEETDPQRLENLWNWMCDSILTTPLMLPDGTMIRFQHSGIFSGYFQTQLLDSVYNLVMLFTILSRLGFDLDTVYAKVQGDDSIILIVCSFLMISNWLIEMFRHYAKVYFGAVLNDKKTEIHPSLEHVEMLKYRNRGGMPYRDRIELLAQLRHPERAITYQALMARAVGIAYANCGSDPLVYQICEDIHQYLSNLGVKPDPAGLPSGVRFVQDYLPGQTTIDVQRFPSYFETCSHLLDGYEEQPSQGYWPRSHFIGIPGRA

SEQ ID NO: 1133 - protein, 622 aa, Rhizoctonia oryzae-sativae partitivirus 2
MEYLTAAFNRLTNWFTGPKNLEYVGQYHYHPHATLVNERSLEMHQKVLHKAFIKYLNDTEIDFIENKMRRSDVDQDAILADFFANDVEDHNIPFDHHTENGLNCMLDAFRPPQKCLPAHLNDVEHHYPYKWQVNAEPPFSTDKYFLENRHKYQDFWDRAKQQWVNYVDPIEITRRYAGRITDALLEQVTPAKFGFMKNAVFSWTRRWHHIIKDGFANLTGLESDAYVRDRFIFPMLLHTKTAIVKKDDPNKMRTIWGCSKPWVIADTMFYWEYIAWLKLNPGISPMLWGYETFTGGWFRLNRDLFISHMKSSFLTLDWSRFDKRAYFSLIQKIMYGVRSYLDFSRGYLPNVNYPNTEHDWSSSKEIRLERLWLWTLENLFQAPIVLPDGRMYVRKFAGIPSGLFITQLLDSWYNYTMLATLLSALGFDPRTCIIKVQGDDSIIRLGVLIPPNEHELFLLKLQELAEYYFKAQISLEKSEVRNSLNGCEVLSYRNHNGLPYRDEIQMLAQFYYTKARNPSPEITMAQAVGFAFASCANHKRVLLVLEDVYLHYAQQGYTPNRAGLSLVFGNSPDIVIPHYETDHFPSVAEIRQYLLNSHYSNTKASSKTWPKNYFLHDPCARP

SEQ ID NO: 1134 - protein, 620 aa, Rhizoctonia oryzae-sativae partitivirus 3
MEYLVHAFKMFSLEPSVSQNLQMIGTYHYKPASPHVHTPHVEAHKKTVLKAMEKYLYPREINTIVNELRRSDVNLESILDDFFDNNVPLHRIPFDEHVEYGLQCMADAFRPPRPARPCHLNDVEHHYPYKWQVNAEAPFATDKYFLDNRHKFRDFYDETTGTWKHADPIDMERRYGNRLDTVLDQITPPKFGYMKNAIFAWTRRWHHIIKDGFTDLTGLVSSTYVRDRFIFPMLLHTKTAIVKKDDSNKMRTIWGCSKPWIIAETMLYWEYIAWVKLNPGITPMLWGYETFTGGWLRLNAALFSSLMKNSFVTLDWKRFDKRAYFELIYRIMLVARTFLDFENGYVPNVNYSATHADWSHTKAQRIQRLWEWTLDNLFNAPIVLPNGDMYKRNWAGIPSGLFITQLLDSWYNYVMLATLLSALGYDPKACIIKVQGDDSVIRLAVLIPPQYHELFLTRLQDLADHYFGAVISIEKSEVRNELNGVEVLSYKHIHGMPYRDEIAMMAQLYHTKARNPEPSITMAQAVGFAYASCGNHDRVYYALKDIYEYYASQGFAPNPAGLTLVFGNSPDRFELDVPLDHFPTIHEIKKYLLNFEYRNEHQEHKTWPLDYFLNPPCSTL

SEQ ID NO: 1135 - protein, 617 aa, Rhizoctonia oryzae-sativae partitivirus 4
MEYVKKVLNYLFGPKFEEYNFIEIGRYSRPPHVPTQDDMSVEKHKIVMMKSMSKYLYNWEIDEILNYRRTTTTEEDIERDFFAGNVEPFDPPLDHNFELGLQDMLDAFRPPQRCRPCHINDVEHHYPFKWQVNAEAPFSTDDFFLDNRPKISELADTRFAFLDQNYVQRLLSKQTPEMNNPVPAKFGPMRHTVFNWTRRWHHVIKDGFEAHAHLRESDPYFENHYIFPMLLHAKTAIVKKDDPNKMRTIWGCSKPWIIADAMLYWEYIAWIKLNIGSTPMLWGYETMTGGWMRLNAALFSSHMSKSYLTLDWSRFDKRAYFTIIRRIMFGILDYLDFDHGYVPNRDYPDTSTDWNEDKAFRILRLWLWTLDNLFNAPIVLPDGRMFKRLFAGIPSGLFITQLLDSWYNYTMIATILRSMGYNPKSCIIKVQGDDSIVRLGLLINPDEHEEFLLTMQKTADHYFKSVISVDKSEIGTSLNGREVLSYRNKNGFPYRDEVKMLAQFYHTKARKSTPEIAMAQAIGFAYASCGNHQRILSVLEDMYEHYAEQGFTPNPAGLTMVFGNSPDTERPFIEMDHFPTVDEIKRFLVCTDYSNEAQTKRTWPLSYFAYPPAGRPE

SEQ ID NO: 1136 - protein, 613 aa, Rhizoctonia oryzae-sativae partitivirus 5
MENLTYVRTIPETERMLPNKWKIASEAMKARNEWLERQMRKFYSDDEVDQVMTNRRSADSDEALMEDFFRSEFSRHEIPVDECFLVAVETVTEHFRPNRILHPVSYPDLRYYPAELSVSAERPFTDPSFRFKPMDRDVDDETGQPKVSKPGSQAKLRKWSKHTDVNSYLRWKQSIGLIDDEKASYHNLYNEIFIYNRPLIHMIKEGEEPFWKDGKPIPYQELTLHMRSHVVSATEPDKIRAVFGAPKLLLHAELTFIWPLQASYLNGDCGRMLWGREMNRGGWRKLYHEMFRHGRPKTILGVDWSQFDKRLLHQLIKIVHNIWRSYFDFSKYESTSTYPNANPRDPRRIERLWEWMCNAITGTPILLPNGQVWKWNWNGFGSGFQQTQLMDTFANAIMIYTCLLAMGVNVRSKSFWARFQGDDSISHRVRLHIVWQPPTFLIMLEECARHYFNAKLNVKKSAIQDKVSGMFVLGYFNNNGLAYRTDEDLLRHLMFPERPQDFGRLAASAVGLAQASMGCSPRFYSLCLFIFEKIVHERQIPIKWKALKWMIRANIFESLDQLKTTEFPRLIDLQIRRYAMTNRTEEEKQRQWPTRPRTDNASFYFLDDVTASV

SEQ ID NO: 1137 - protein, 582 aa, Rhizoctonia oryzae-sativae partitivirus 6
MFYSTISKVKTFFANLFATDPHGFVNNFEFIGYASDRIRVSIPSRNEFQYERYQRVVRHALRRNLLGYDAEYIINGYHHPQATLQFMVEALRKGDLPDHVIPKDEHFLAAFTRAAELFRPPELIRPVHFADLRMYKWNWHPNVEEPFYSDVELIRAVSMAAEAGLLPDARMSFGNLRNVVFIKTRTYLHQIKRRAIRNPGTLWPPMKIHVKPALTKTDETKVRIIYGVSKMHVLAQAMFLWPLFNYYINSDDDPLLWGFETILGGMQKLHLQMSIPHLYFQTFVTVDWSGFDLRSIFSLQREVFDVWRTYFDFEHGYIPTKFYRESVADPQHLENLWEWQREACFNMPFIMPDRTMYNRRYRCIPSGLFCTQFLDSHVNMVMILTILDAMSFDISRIKVYVQGDDSLVMLVFHIPADQHSEFKRKFEALAKYYFDHIARDEKTHVSETPHGVEVLGYSNNNGYPERDWRKLLAQLLHPRGALSLETLAARCCGIAYASMYRYPEVINVCQDIYNYLVTRRAIVPGELRAQRDVILFGEHEFEVPTDHFPTMGEVTRYLRQPYVRTQADKDDYWPSSHFLSTH

SEQ ID NO: 1138 - protein, 340 aa, Rhizoctonia solani partitivirus 1
RWKHSQGLIEDSAVSFHNLYNEIFSENRFRIHQIKNGAKEFWTEKGEPIPFQRLKMHLRTHVVDFDKPDKVRAVFGAPKLLTMAELMFIWPLQASYQKNLDIGKMFWNREIGNGGWQLLLQEFHSFTSNTYISMDWSGFDRRLLHEMIDDVHGIWRSYFDFSRYEPTQMWNDTTVNDPERIERLWKWTCHSIKHTPIELPNGQVWEWTHNGFGSGYQQTQLMDTFCNMIMTYTVLLSLGVNVRGKHFKSRFQGDDAILAFPERKFQMHGKDFLTQMADKAKYYFNAILSDEKSTIGSHPNSLYALGYGNRYGMAFRTNEDLLSHLMFPERPQDLGRLAAS

SEQ ID NO: 1139 - protein, 603 aa, Rhizoctonia solani partitivirus 1
MKFQVLKNLVFQERIKLARRPGFNAWEWPTDQKLRRDEWLLRMIRRRYLEADVQKMLTNRRSLGTDEAVVKDFFTNEFPKHHIVRDEHYERALRVVAEQMKPNRTLHPVSFPDLRAYPATLNVSAELPWTDPTWKFTPQGRDVDAETGQPRVRLPNQTKLRKFANGTTVPAYLRWKQELELIKDSDTSYHNLYNEIFDLNRRLVHQIKHGYHPFWKNGKPVPYQRLKLHLRTHVVSEDKPDKVRAVFGAPKLLLHTELMFIWPLQATYQNTDAGRLFWGREIGRGGWKQLLHEMHSHTQNTYISMDWSGFDRRLLHELITDVHKIWRTYFDFTSYEPTTRYPNPEVDPATIENIWNWMTNAILQTPIELPNGEVWSWRHNGFGSGYQQTQLMDTFCNMIMTYTVLSKLGVDIESPLFKSRFQGDDAILTFPEPMYFIYGRNFLSMMKKEAELYFNAKLSDDKSGIGDHPNSLYALGYNNRYGMPYRTDEDLLSHLFFPERPQDYGRLAASAMGLAHASLGCSKQFYDLCQDIWNAIVIEKQIQPNWKQLKWMKRAGMEEVLESLQTGEFPEYNDLLAAGITTVERTEREKQKSWPTIPKGLTG

SEQ ID NO: 1140 - protein, 620 aa, Rhizoctonia solani partitivirus 10
MDYLSKKLAYFKNFATNMDVENFVQHETPFNNPPAQPHINETGIENHKRTMLTSMESYLTNEEIHRITVEMRRSSIDAESVQNDFMSGNVPYHEIPDDRHLEEGLDAMYLAFKPPRLAKPAHLMDVQHHYPFNWQVNAEPPFSTDTYYLDQRETLGEFVERRGYEHINVDDFMRRHGMHLSNPSFINQKVPPKFGFLKDTIFNWTRRWHHVIKSRFTDLAGLRAHDYYLKSRYVFPMLLHTKTAIVKRDDPNKMRTIWGCSKPWIIADTMFYWEYIAWVKQNRGATPMLWGYETHTGGWMRLNAELNSRLARNSFVTLDWSRFDKRAYFWLIARIMQKVRLFLDFSNGYVPTVSYPEHLLWGEHQTDRLQALWEWTLECIFDSKIVLPDGTMWSRLFAGIPSGLYITQLLDSWYNYTMIATILSAMELDPRHCIIKVQGDDSIVRLGVLIPRSQWDHFLELFEKLALQYFNAVVSTEKSEIRNQLNGCEVLSYRNANGFPYRDEIKMLAQMYHTKVRDPTPEITMAQAIGYAYASCGNHERVLLVLEEVYNYYASQGYEPNRAGITSVFGNSPDLEPMNVDLTHFPTLNEIKRFSCNMEYESESLRAFWPRDYFTSSPCS

SEQ ID NO: 1141 - protein, 585 aa, Rhizoctonia solani partitivirus 11
MEALPHLMDKLTFKEQTGHNFVFIGKYHRTIPRHIVFEPNIEHHQKTVRHAMAKYLYKEEYEMIIYDYRRSRATEDAILADFFNGDIPYRQIPKDEHYYYGLHTMLDLFRPPEKCRPVHLLDLMDKYPFKWQVNAEAPFSTDKYFLKQIPPGHGNKFGDMKYTIFQWTRRWHHVIKSGMDPESAGLTATDVYARNNYIFPMLLHTKTAIVKRDDPDKMRTIWGCSKPWILADAMFYWEYISWVKRNRGATPMLWGYETLTGGWLRLNDELYCSHLRQSFIMIDWKRFDKYAHFDLMHDIMYGVRDYLDFDNGYVPTINYPEPEKDWDSFKATRLQRLWLWTLDNLFNAPIVLPDGSMYRRLHYGIPSGLYITQLLDSWYNTSILLTILSAMGFKENEVFIIKVQGDDSIIRLGLLIAKSGHARFLELMQHFADHYFGSIISIDKSKMTNNLNECEVLSYSNFNGIPRRDEVKMLAQLYHTKAKFPTPGRTMAQCIGFAYASMGHNIRVLNVLQDVFEYYKRQGYSSDKQGLDDVFGDSPDMNLPTLDLNEFPKVSDIQKYYLTFDYVNEAALRRTWPDDYFMRTI

SEQ ID NO: 1142 - protein, 577 aa, Rhizoctonia solani partitivirus 12
MEALPHLLGKLTLSEETGHNFVYIGKYHRTIPRHIVYEPNIEHHQQTVRHAMAKYLFKDEYQTVIYDFRRSKATEEAILADFFNGDIPYSPIPKDEHYYFGLQAMLDKFRPPQKCRPVHLLDLMDKYPFKWQVNAEAPFSTDKYFLKQIPPGHGNKFGDMKYTIFQWTRRWHHVIKSGMDPESAGLTAHDVYARNNYIFPMLLHTKTAIVKQDDPDKMRTIWGCSKPWILAEAMFYWEYISWVKRNRGATPMLWGYETLTGGWLRLNNELYCSHLRQSFIMIDWKRFDKYANFDLMSDIMHGVRSFLDFEHGYVPTINYPEPEKDWDHFKSTRLERLWNWTLDNLFNAPIVLPDGSMYRRTHYGIPSGLFITQLIDSWYNTSMLLTILSAMGFRPNEVFIIKVQGDDSIIRLGFLIARDAFDRFLELMQDKADHYFKSIISIDKSKMTNDLNKCEVLSYSNFNGIPRRDEVKMLAQFYHTKAKFPTPGRTMAQAIGFAYASMGHNTRVMNVLQDVYEYYQRQGYSPEKAGLDDVFGDSPDLNLPQLDLESFPTVADIQKYCLTFDYINEAGLKRTWP

SEQ ID NO: 1143 - protein, 585 aa, Rhizoctonia solani partitivirus 13
MEALPHLLSKLTMSEETNSNFVFIGKYHRNAPRFEVYEPNIALHQKTVLKALSRYMYQEEVHRIVHEHRRSDASPEAIEADFFNGDIPDHPVPKDEHYQYGLTTMLDLFRPPVQCRPVHILDLYDRYPFKWQVNAEAPFSTDKFFLRQVPPGSSGKFGDIKYTVFQWSRRWHHIIKNGLIPDDAHLHKDDPYAANDYIFPMLLHTKTAIVKRDDPDKMRTIWGCSKPWVLAEAMFYWEYIAWVKRNRGATPMLWGYETLTGGWLRLNAELYCSTIRQSFIMIDWKRFDKYALFSVIRDIMQGVRTFLTFEEGYVPTVNYPETDSTWDSFKSLRLQRLWEWTIRNLFEAPIVLPDGRMYRRLFAGIPSGLYITQLLDSWYNTTILLTILSSMGFRRNEIFIIKVQGDDSIIRLGFLISKPGHARFLELMQEKATYYFGSIISVEKSKMANRPNECEVLSYSNFNGVPHRDVVQMLAQFYHTKAKFPTPGRTMAQAVGFAYASMGHNPRVMCVCRDIYEYYQRQGVTPDSLGLEDVFGDSPDIEKPFIDLDEFPSVETIQKFYLTFDYRNDKRLHRTWPEDYFLRTI

SEQ ID NO: 1144 - protein, 620 aa, Rhizoctonia solani partitivirus 14
MEELMFMIENLSVQESGYRNLRLTGRHEHRHHKPDVNTKSIQMHQKVLEHAFRQFLTPVEISSIIDDYRRTDVDYEAIMTDFFANNVPKHDIIFDQHLQLGLQCMADAFRPPRRARPCHLNDVEHHYPYKWNVNSEAPFSTDKYFLDRLPTYRDFWDPTTKTWGRHIDPIKMMERFGDNPTDEQLDTQTPAKFGFQKSQIFSYVRRWHHIIKDDFKSTTGLDNPSYFKDRYIFPMILHTKTAIVKRSDPNKMRTIWGCSKVWVIAETMLYWEYIAWVKKNRGCTPMLWGFETFTSGWLRLNNTLYNSLMRNSFITLDWKRFDKRAYFPLILHIMWTIRDFLDFDNGYCPNVNYPTTAWNWNQSKSERIQRLWLWTLDCLFNSAIITPDGWLYIRLHAGIPSGLFITQLLDSWYNYTMIATLLSAIGLDPKRCIIKVQGDDSVVRLYVIIPPDMHDAFLAELQRLADHYFRSVISMEKSEVRNTLNGVEVLSYRNCNGYPYRDELKMLAQFYYTKARNPSPSLTMAAAIGFAFAACGNHPRVHMVLEDVYNHYKLQGYTPNAAGLNHVFGDSPDRASIHIPLDHFPDLSEVRASLLNYNHNFEVTDQRTWPLDYFLFDACK

SEQ ID NO: 1145 - protein, 589 aa, Rhizoctonia solani partitivirus 15
MDSLLTSLSQLSINSNLEFIGYDPHHGSVPQMNKSHNDWFFACRALVVSTICMYAFFFNLQTVQRVLYDYRRPHPTPEKAEEFFLRYDVNKHQILKDEHYWKALLIVTEWFRPRWKIHPVHFTDLRWYPWNKNTSAERPFTTEPFYKTYVQYWFKQNWLLDGKLSFRNLENHIWLRIRPMLHRIKRGLTVAIPPITLHVKPALVFDIVDKVRTVFGVSKLVIFIEAMFFWPLFSHYFTICKTPLLWNYESLNGGWHRLNAEYRSRYTSFKPVFNLDWSEYDMHIYFDMWKDCFDSVSSYFCFCGCYCPTNPGVAQGSGYPKPRTKPEYIFNLWKWIWTAYTSMLCISPTGKVFKRLFAGMPSGIFCTQFWDSFYNCVMVVTILLSLGYEIHPDHFLKVMGDDVLFGLLTMIPISEWAEFLDAFADEAKRRFNMKLSPSKCGASETIQGASVLSYSNNNGWPVRDPETLLAQLLNPKSLKDTFPRLMARAIGIYYASAGSPKLRPICKHIYDELKHQGFEPHHRVIYEMFGHLPETVSFISLDHFPSEVEVLSRISRPSGRSDELQSQYWNREHFIFESGLAPHCDEMTN

SEQ ID NO: 1146 - protein, 623 aa, Rhizoctonia solani partitivirus 2
MNLYNRVSALFANWFSSPSNLEFVGSYHHQSGTVPPNPSTQEAHKRFLHNVFKQHLFTYELDYIENEHRRSEATPEAIENDFFANDVEPHDIPFDVHVEIGLQCMTDAFRPPVPCLPAHLNDVEHHYPFKWQVNAEPPFSTDSYFLDNRKLFSDYYDTESQTWRGYVDPFEANRRYQHTKDKEGFLNQTVPAKFGFMKDTIFSWTRRWHHIIKEGFQTATNLSSTAYLRDRFIFPMLLHTKTAIVKKDDPDKMRTIWGCSKPWIIADTMFYWEYIAWIKKHPGVTPMLWGYETMTGGWMRLNSQLFSSYLKKSYVTLDWSRFDKRAYFKLILAIMCRVRTFLDFDNGYLPNVNYPDTRTDWSPNKAQRLERLWLWTLECLIKSPIVLPDGRMYIRHYAGIPSGLFITQLLDSWYNYTMICTILSSIGLNPKHCIIKVQGDDSIVRLGVLIPPEAHEAFLLALQSKADFYFKAIISVDKSELGNSLNNREVLSYRNYNGLPRRDEIKMLAQFYHTKARNPTPEIAMAQAVGFAYASCGTHQRVLDALEHVYTDYKDAGYTPNRAGLSLVFGNSPDIQLPHYDIDHFPSIEEIKRFLTCNSYDNSVQMAKSWPKSYFISEPCERM

SEQ ID NO: 1147 - protein, 800 aa, Rhizoctonia solani partitivirus 433
MAKAIEDFILRSYRLKVCPNQLRPTVTLFTIDRISHMVLILDLSNRVFYSLHVTTYVTLRLLLRFQIKKRQNRTHTQLRYPIRNIYFEWTLRRSSPKDQPPTIFVYEKSILSYIDLATSKKIEDQLENSTLSILEHYSARNEDFSIYEEISQTDVPEDRLPASGIKLSLRRYHSIPSSTLHDEQRPQIIINDPYFVETPDFRSNIVYSEETDLSGSPPVPEILSIIQEWFPSYLKHLDELCRPPSYGPQAFQDFNRPTPNPAPPPKERHDTIIRIILLKMAIKPYRPIHFADTLAGDQPLITSASYFSKFDPHSRIYARYSAPSLYRDRPTSKGYFLNVVLNQFRRELHNVKDSISPYSGIIDEFEIPHANELWFAKHPAQLFIRTQISKRAPDQPKKIRPVYSVDDRFLTIEKMLTLPALAQLRNPQSCVAHGLETFRGSMQQLNLVFYYYASFISIDWSQFDQRLPSYVILSFFLDYLPQLLIISHGYMPTRQYPDSTQPKHIFANKIFNILIFMLQFYLNMTFLSYDGFAYIREHGGVPSGALNTQHLDSFGNMYVICDCLLEFGFTEQECLQMLFCVMGDDNLIFMQDNIAKVTAFMTFLEHYCETKHGMVLSILKSAFSHLRNKLTFLSYDNDDGHPTRSISKLVAQLALPERPINPERKWIHSARALGLAFASCGQDQTFHLLCKMVYEKFKPSGPVPSEHIMKTFKKWKFQLPEFDIQTPEYEFPTFPTCAEIRHRLNFYEGFLSEADKWNDFVFTVPPSDNLTDYVTLKEYIDTDANMQLIISKFWQGFRTL

SEQ ID NO: 1148 - protein, 757 aa, Rhizoctonia solani partitivirus 6
MHTFFTCGLFYYFIRVWRFKTKHKKFDLRFYNQLRNIHFEYRDRLTSGPDEPPFVYSKSILTIIDKVIATRYAQHHDDIIDGIRSHRISIAHGPLGLYDPVDYDDIPELRLPKPGILVLPFRYHEKSPGIGYTSVGERLLTNDPSAAEEPLDRKAETYIVDTDLSGFPPNPEIVHIIHYWFPQYLEHLEYYCRPYSFGPQAFYDFNRTTERKPPPSKEREDEILSILDELFNIKPYRPIHFAETLASGIPLNTSAPFAEKHDPESIALARWNSPSEYADRPTSKGHFVNSILTFGRRILHNVKETGTPNADSLSDALIPDSDANSRLQNFFLRNPTELFIRTQISKRDPNEPKKIRPVYSVCLLFILFEIMLTYPLLAQLRNPECCVLHGLETFRGSMHVIDYCAQQYQSYVSLDWSQFDQRLPIYVIIAYFTRFLPRRIVINKGYTPSHSYPDTRFSNPDIFAIKIFNLLQFVLLWYLNMVFISFDGYAYVRLNGGVPSGLLNTQSIDSFGNAYIIVDCMLEFGFSKSEILDMLFFIMGDDNIFFARQNINRIHDFMKFLDSYAKDRHGMVLSILKSTYTMLRSKIEVLGYTNNFGMPTRPIGKLVAQLAFPERPVPDDKQWMHAARALGLAYASCAQDATFHLLCREVYNKFKPSGPVSTAQIKRVFKYTVSDLFEDDLTSELFVFPDFPTLYEVKSLLDHYHGFFSETDKWQKAIFSDIPHVSDDDVVTLETWLASHPNYQFRTDHIMQGSTAP

SEQ ID NO: 1149 - protein, 733 aa, Rhizoctonia solani partitivirus 7
MSHYQIPPYDIPPVLAEIDFESQNPDTQRYRDLLESYRLSPTEHNLQAIRDYVSHHDFTYFQPTGLSVMPDNRAPAAGIRAIPEFIFHPVAALRSYANIPRTGLNPLWNIANIIGTYFCSLTVVLLNYCRPAGNSEAIFENFNQPVTPVADVAPDRLESIMNLIFFFLPIVPYMPINFPDLRFYKWSLVTSADYHAHNSTDMKEESARYWSHLKENDLLEERFDYSINPRSKGFFFNSLLLRCRRIVHNIKYTGWPIPPNEKETQQSFFQRMFYWSMMNPTVMYVRSQISKLTKLKVRPVYNAPMLFLMLEAMLTLGLMAQCRKDDNCILWGYETIRGGMQRLNEISQEFNTFMGFDYSRFDQLAPFTVIYHFWATFLPRIIRVDRGYQESTIYTKTQYDYDFDKKYDNLDASSAEFKAFHSSLDSHYKRSVITFAFVITNILKFVWWWYVMMVFITPDGYGFVRLLAGVPSGIFMTQILDSFVNLFLFIDSLLEFGFTPDEIKCFRLFIQGDDNLVFYLGNLERIFEFYEWYPTYVNERWHMDVSIEKSWITRLRSKIEVLGYTNLNGMPRRDMAKLVATLAYPERTVLEKNRYPILMSRAIGIAYANAGADYQVHRLCEFAYLDARQKSGLSEEQLREITIPYQKLGFYEIFSVNLEELFPVLLKNLDRFPSFHEIRDNLRTWHGPHDVYPMWPRQFNNRPDHIDPDDTVITLADVLKTANVVIPKLHETL

SEQ ID NO: 1150 - protein, 706 aa, Rhizoctonia solani partitivirus 8
MVFDTVRNYLHELRTTLTKEWSLSNKFGSTTVNPSSSEPDADLRRLQTTFRNLDIEKYLTNEYHQHATDLYFGLLESDHMKDEPFEFYTHIDTSIVPQSRQPNPGIKLLPIKMHRDQIVSATLKVPESGFNVDPPIYNLLLNDYPRYLPYIKKYCRPLGTTDATFTDFNREQVKYPDIPNDLILQIVRIVTTLLGAKPFRPLHWIDTYFTGMPLHTGVSYFYRHSYDMKTHAAFAANKDYEHKQTSKGYMFNTFAQWSRTVVHHIKEFALPFNPSKLTPPEIKAKLAEFFIRHATMLFTRNHISDRDGILKQRPVYAMDTLFLHIECMLTFPLHCMARSTSSAIMYSMETIRGGCARMSQLSMNFSSFLCIDWSAFDQRMPWIIVDTFFTKFLPSLIVINQGYHATAEYPTYPDLTSEKLFTRILNLISFLRLWYYNCVFVTADGYAYVRQFAGIASGMLNTQYLDSYCNLFLMIHALIHFGCSEQEIFDIMFFVMGDDNVILTHWDALRLTRFMSYFEQHALSRFGMVLSKTKSIITTLRYKIEMLGYTCNNGNPKRPLGKLVAQLCYPEHGIKPKYQSARAIGMAWAAAGMDPTFHTFCRDIYLLYLREAEIPDAENTQMILKHMPGMFKMLDDAQELFADLRFPKIQEVRERYAKWQGELDLNKKWSPVHFLNPPDFVTDHPMTVQDWMSEHNIHFKDVERLL

SEQ ID NO: 1151 - protein, 756 aa, Rhizoctonia solani partitivirus 9
MLTFYTTAIFCYFIRVWKFKTKHKKFDLRYYNQIRNIYIEYKFRESSHLDDPPFVYSKSILTIMDKVIATRYAQHHDDILDGIREHRITRDLPLGLYDLIEYSDIPDLRLPKPGILVLPIRYHEKSPGIGYTSVGERLLTNEPDAAEEPLDRKAETYIVDLDLSGFPPNPEIVQIIYYWFPQYLVHLDYYCRPYSFGPQAFYDFNRTTDRMPPPSYERETQILELIDSFFNIKPYQPIHFAETLASGIPLSTSAPFAEKHDPESIALARWNSPSIYASRPSSKGHFINSILTFGRRILHNIKETGTPNGDPLLDALLPDSDANSRLQNFFIRNPTELFIRTQISKRDPSEPKKIRPVYSVCLLFILFEIMLTYPLLAQLRNPECCVLHGLETFRGSMNVIDSVAMAFTSYVSLDWSQFDQRLPIYVIITYYTRFLPRRIVINKGYTPSHSYPDTRFSNMDTFAIKIFNLLQFLLLWYLNMVFISYDGYAYVRLNGGVPSGLLNTQSLDSFGNLYIIIDSMLEFGFTKSEILDMIFFIMGDDNIFFARMEFNRICDFMKFLDSYAKTRHGMVLSILKSTFTRLRSKIEVLGYTNNFGKPTRPIGKLVAQLAFPERPVPEDKQWLHAARALGLAYASCAQNATFHSLCYEVYKKFKPSEPVPSAQIKRVFKYTVSELFEFELDTEMFTFPDFPSLYDISNMLNHYHGFFSEEDKWQRNIFADAPHVSTDNAVTLEQWLASHPSYQFKTDHVMQGSTAP

SEQ ID NO: 1152 - protein, 617 aa, Rhizoctonia solani partitivirus virus 3
MEYINRVLSYIFKPKFEEYNFIEVGRYSRPPHVPTQDTLSIEKHQNVMMHSMRKYLYPWEIEQIESYRRTTTSESDIERDFFTGNVEHFDPPLDENFELGLADMLDAFRPPQKCRPCHINDIEHHYPFKWQVNAEAPFSTDDYFLDNRPKISELADSKYAFLDQRYVDRLLSKQTSEMNNPVPAKFGPMRHTVFNWTRRWHHVIKDGFERHAHLKDNDPYFQNKYIFPMLLHAKTAIVKKDDPNKMRTIWGCSKPWIIADAMLYWEYIAWIKLNPGLTPMLWGYETITGGWMRLNAALFSSYLNKCYLTLDWSRFDKRAYFSIIRRIMFGILTYLDFDNGYVPNVNYPDTKSDWSHLKSQRILRLWLWTLDNLFNAPIVLPDGRMYKRLFAGIPSGLFITQLLDSWYNYTMIATILRAMGFNPRQCIIKVQGDDSIVRLYVLIPPAKHEDFLLRMQELADHYFKSVISVDKSEIGSSLNGREVLSYRNKNGFPFRDEIKMIAQFYHTKARKSTPEIAMAQAIGFAYASCGNHDRVLSVLEDMYDHYLSQGYSPNPAGLTMVFGNSPDTERPFIDMDHFPSISEIKRFLVCTDYRNDVQSRRTWPPDYFLHPPACKPE

SEQ ID NO: 1153 - protein, 624 aa, Rhizoctonia solani partitivirus virus 4
MEYLTAAFNRITSYFVGTKNLEFVGTYHHRPSHPPVNPSTLEAHQRVLFNSMKLYLNDFEIKYITQEHRRSEVSEDAVLADFFAGDIENHEIPFDEHVEQGLQAMTEALRPPNKCRPVHILDVKDRYPYKWHVNSEPPFSTDEYFLSNRKLFADFWDPVSQTFEKYVDPLDAMRRYGNKIVENLLPNVTPAKFGFQKSAIFSWTRRWHHIIKSGFTDLTGLESTAYLKDRFIFPMLLHTKTAIVKKDDPNKMRTIWGCSKPWIIADTMFYWEYLAYLKLNHGVSPMLWSYETFTGGWFRLNNELMNSLFRQSFVTLDWSRLDKRAYFTLIHKIMAGVRTYLDFENGYVPTQQYPRSSHQWDAYQAGRIENLWLWTLENLFKAPIVLPNGNMYIRKYAGIPSGLFITQLLDSWYNYTMIATILSAMGFDPRCCIIKVQGDDSIVRLAVLIPPAAHVEFLSRIEELALHYFNAVVSLTKSEVCNRLNGVEVLSYRNHNGIPHRDEIKMLAQFYHTKARNPQPEIAMAQAVGFAYASCGHHLRVYYCLRNLYEYYADQGYTANRAGLALVFGNSPDLDLPHYDVDHFPTIQEIQRYFLCTEYRNQAQENKTWPLDYFLNPPCSRDDD

SEQ ID NO: 1154 - protein, 584 aa, Rhizoctonia solani partitivirus virus 5
MFYTLISAVKRFISSAFIGFDPHGFQNNFEFIGYASDRIQVSIPSRDEFQYERYQRTVRHALRRNLLGYDAEYIISDFHHPIATMDLIVATLQKGDLPDHPIPKDAHFQRAFNLAADMFRPPVPVRPVHFADLRMYKWNWHPNVEEPFYSDIELIRAVNAAAEAGLLPDARMSFGNLRNVVFIRARSFLHQIKRNQITNPGVLWPAMKIHVKPALTKVDELKVRVIYGVSKLHVLAQCMFFWPLFNHYINSDDDPLLWGFETILGGMQKLHDIMSIPRLHFQTFVTVDWSGFDLRSVFSLQREVFDVWRTYFDFNNGYIPTKFYRESKADPQHLENLWEWQREACFKMPFIMPDRSMYNRRFRCIPSGLFSTQFLDSHVNMVMILTILDALEFDISKSTRIYVQGDDSVVMLIFHIPADQHKDFKAKFEVLAKHYFDHVARSEKTNIHNEPNGVEVLGYSNYNGYPTRDWRKLLAQLLHPRGALSLETLAARCCGIAYASMYRYPEVINVCRDIYEYLTVRRGIKPGELQAQRDIILFGEHEFSIPTDHFPTRDEVTRYLRIPYRRTQADRDDYWPSSHFMSTH

SEQ ID NO: 1155 - protein, 471 aa, Rhodiola cryptic virus 1
MEGLVMIGQVPTRATREQFQILKDEPVYEVVSKFASIADMQEIDGWARSFYTIEGHIESIMQYRKPLLPEPDEPAWTEAKASVMYDVMTSIPRVRSLSFINQLDDVPYESSSAAGYGYAGKKGEGDNFKRAKSITNALVRTYVERCAKGEKQEALKSVITECTPDVAFTRTQLARLPSIKVRNVFGEAFHYILIEGLSASPLLEAFKRADTFYVTGKDPTTYVPRFLSHLDNQPGWVVALDWSRFDATVQLWEIDHAFQCLENVLDFPEEYSRACFFLSKELFKKRKLAAPDGVMWMRTSGIPSGSYFTNLIGSIINYTRIKFLCNKLGYQMGEVRVQGDDSVFKAQAPNKPDVYAIAQAVADFGWELNPAKCVVTHNTDGLTFLGRGQYQLFNIRERLKVLRLLCFPEYEVDDPMISTARVKMICNDAGFRDMMYNKIYLAMNRLYGEAETVPDRYKTYVDLNDWQDVNM

SEQ ID NO: 1156 - protein, 477 aa, Rhodiola cryptic virus 2
MELNAILDFEFKDYSSDMTRQPETHFHRVRRIPEHTIIDKYAHAKLINFQEELFRQELKGWSRSYYSQAKHLEALMNYSIPNIPVSKINFTLYQSCVNEIRTGFRSLPKARAFDVLTELDAVTYKSSTAAGYDYNGAKGPKYGQNHKRAIIRARAIVGDVSDRGIEGMKNVINTMVPDVGYTRTQLTDLTEKTKIRNVWGRSFHYILIEGLTADPLIRMFQRNNTFYHIGRDPLDSVPKVLSEISKQSKWLYAIDWKQFDATVSRFEINAAFDILLELIDFPNAETYTAFEISRQLFIHKKIAAPDGHVYWVHKGIPSGSYFTSIIGSIVNRLRIEYLWRTLTGKGPKVCYTQGDDSISGDDELILPEDFARIANQIGWILNPDKTEYSTIPRDVSFLGRTMTGGMNTRSTIKCLRLLVYPEYEVESGRISAYRARSIAEDAGGLSGELNRIANELETEYGVASEDEVPDHFKKYVI

SEQ ID NO: 1157 - protein, 479 aa, Rose cryptic virus 1
MEHRFRGIPRGLIELEEIPTRRLREECVIHIDAWSSQAIDAIVPLSLRNELDGWARSYYTLQAHVDSLMQYDRPKLQPPTNTAWNITTQYIRTEFARMKKVTALSYLQLDQVKWVRSSAAGYGYTGRKSDGDNYIRARKTAFTLAEKLNHNRDYGPLALEDSTPDVAFTRTQLCQIKVKRKIRNVWGEAFHYVLLEGLFADPLIQQFMRIKSFYFIGEDPLLAVPRLIEEILSEQDYIYMFDWSGFDASVQEWELRFAFGLLESILIFPSSVEHQVWQFIIELFIYRKIAAPNGKIYLKTLGIPSGSCFTNIIGSIVNYVRIQYMFFRLTREFVTAFTHGDDSLVGVPTTQYVQMENFKPICDENLWTINIAKSAISREAEGVSFLSRKVREMCHARDELICLRMLKFPEYIVETGAMSTLRAFSIHKDAGINSRYLYQIYKFLLHRYGKADSLPLNQQNWDPIEYENLRVSYATQNYE

SEQ ID NO: 1158 - protein, 479 aa, Rose cryptic virus 1; identical to SEQ ID NO: 596

SEQ ID NO: 1159 - protein, 586 aa, Rose partitivirus
MRNTVVIGHRPVLAKPLFGNPDPGSNPAYGDTVDHALKRHLSPEEFDIVVHKYRRSPWNEDALKDDIAKLDSNEHPVLKDEHYYRAIEHVKKLFTPEEKLRPVHFADLRYYPWQLSSNIGAPFATSKKWQEYVNDKFTAGQTAPQVRNLFQEAHGTPLEPEVIDRRMTKRNLYNEMFLINRKNIHLIKDGRKTNDSGHDLRYWHTAFARQHLVEHDEPDKVRLVFGAPSTLLMAELMFIWPIQVSLLARGPDSPMLWGYETLTGGWSRLHTWATKAQPRLGSVLTLDWSRFDKDARHTIIKDIHSLIMRPMFTFDNGYHPTVYYPETPETDPNRLENLWNWMTDSILTTPLILPDGKILQFMHSGIYSGYFQTQILDSMYNSVMLFTILSRMGFNIEKVAIKVQGDDSIILMPYQYTVIKDTFLQFFSAYAQEYFGSTLNMKKSEILPSLERAEVLRYRNHGTMPERDELQLLAMLRHPERTSSLPSLMARAIGVAYANCGNHTRVYQICEDIYKYLAKGGFKPDPFGLPGGLRYRQNYIPSYVQIDISHFPTYFETVMHLQDPHRAILTNRHWPTDHFIGTPGKS

SEQ ID NO: 1160 - protein, 573 aa, Rosellinia necatrix partitivirus 10
MATLTHQLCNLTNLERIGRFRFKFPRMGKHVPKHTTRFLERSLKKAIWTNCSASLAEQAINGYYRSPTDPLSGEQDFLKTDQPYHPIPRDYHYRRALRVFEKLFRPRRRLQPIHFADLPHYPWTLNTSAEFPYSTSPYWREYVRQKCNEGEIDSTTVNFHNLYNEIFEDNRWKIHKIKEGQEPFWKDGEPVPFGFTFLHSRSHMRKTGEDPKIRAVFGVPKLLLMAEQMFIWNLQREYQNRPLHEGPLLWGYETFRGGWKKLEQRLCKTKFNSILSADWSGFDHKALHELIDDVHSIWRSWFDFDNGYEPSVDIEHDYARTGTDPQRLENLWRWMCHSIKHTPIVAESGNIYRWRFNAIASGFQQTQLLDTAVNCIMKFTCLSACGINIESKDFQALFQGDDSISVFPERVDFQRFLPLMRDEAERRFNATLSVDKTTCGEWLDGIEVLSYQYRGGFAYRDPSQLLAHLLYPEHPRDEPRTMAACIGIATASMGVSRELYDTCLDQFNFLASFGHEPDFSHKEFFWWPKTKTFPTYEETWLQNFDLRERTESDRQGLWPTIPRGRKGFRFLQP

SEQ ID NO: 1161 - protein, 757 aa, Rosellinia necatrix partitivirus 11
MLLIFDIVLLHFLIRVYAYKVKHKKSQKENVWKIRNVYYEYKLREKYGSNIPPFDYSRSILFLIDQLTCYKLDWQYQDSLESIEERRYMKEQPLGLYDRIDHDEIPDIRLPAESIIVLPYRYHQKSPGLAFTSNTNTPVAIADPDAAEEPLDRKPASYDVDADLSGLPPHPGIYKIIYEWFPLYLKHLDTFCRPPSYGPQAFYDFNRPLQSHPPPPPERENEILDLIDGILAIKPFQPIHFADTLASGIPLNTSASYHDKKSPESIIRSKLSSPSIYAEKQTAKGHFINTTLGYARTYVHNIKNYGTPSSETLDDSLQPDEPAQQKLKNFLLSQPTELFIRTQISKRDPTANKKIRPVYAVALMFILIEIMLTYCLLAQLRNPECAVMHGLETFRGSMSLIDRVALNFQSFVSLDWSQFDQRLPLYVIISYYARFLPRKIVISHGYAATHTYPDSRLKTLDAFAIKIFNLLQFLLIWYINMVFISYDGYAYVRTLGGVPSGLLNTQALDSYGNLYIILDCMLEFGFTKSEITNMIFFIMGDDNIFFARENFSRICDFMKFLEQYASTRHGMVLSILKSVWTTLRTKIEVLGYRNNYGMPERDIGKLVAQLAFPERPVPSNRNWMHAARAIGLAYASCGQDATFHQLCYMVYQKFKPDDNTPVSAKRFKEVIKYTALELFGFTEDTDYIVFPEFPSLHSVRLQVGSYAGFFSETDKWKDTIFTNPPSTTDPTVVTLADWLTTHPEYQFTTTNIWQGYP

SEQ ID NO: 1162 - protein, 551 aa, Rosellinia necatrix partitivirus 12
MQDMNLVRLGRQPVNRRDRRFAERFNTRQQKVLESTIKKAIHKCCNEALARQAIHGYRRSKTDPRSGEVDFLKTDQPYHPVKRDLHYRRALKVTESIFRPTRRLKPIAFPDLRSEGDIEDGRISFHNLYNEIFHENRTHVHQIKNGESPFWKDGKPVPYEYTTLHSRSHLVKEDKPDKIRAVFGVPKLLLMVENMFIWNLQKEYLNEKTSKKAMLWGFETIRGGWMKLQGYLSKFRDNTVLSADWSGFDHKALHEVIDDVHQIWRSWFDFDQGYEPSKSDTHDYSVSETEEWRIQNLWDWMTHAIKHTPIKAESGNMYQWKFNGIASGFQQTQLLDSFVNCVYLLTSLSAAGINILSKSFIALFQGDDSVTSFPEKVQNDIFLHKLSSEAKERFNADLSPDKTTIGTTDDIEVLSYGNKSGCAQRPAAELLAHLLYPERPRTAETTAAAAVGIAQAAMGTSREVYDTCVELFTFLTTQWKVTPEYPERNPVLTHNPWNDFNWKPTKVQTFPSFTETFLQNFDNRVRSENDKQHLWPTVPSDQANGFHFLLD

SEQ ID NO: 1163 - protein, 469 aa, Rosellinia necatrix partitivirus 13
MKILPNLTLLKNNLIRYAKKITQSLEPDHFLPTYNKIVDDALLSELSEDEYNKVINGFRRSPWSESALEADIKKLDSPYHEVLKDEHYYAALEYVSLTYFTPEEKLKPVHFTDLRQYPWELSTSIGAPYATSTHWQNYVQQKFNISRGNDPEQEFSFPEYRDLFAEAHKGQSLEPTMVNARMTKRNLYNEVFFINRKHIHMIKDGRTHNDKHHDLRYWNTAFARQHLVEADEPDKVRLVFGAPWLLLMAEMMFIWPVQTWLLSNGETSPLLWGFETLTGSWYRLRRFFQKVTPNFGLCFTLDWSGFDRYARHTVLDDIHTKILRPMFTFEDGYHPTFSYPKTTAEPQRLENLWNWMTNAVKSTPLLMPDGRLFRFEHSGIFSGYLQTQLLDSIYNLVMIYTILFRLGFTAQQIKLKVQGDDSIILILCCFLLVCNWLLPMFTHYATVYFGAKVSEKKAKFETHLKTLKS

SEQ ID NO: 1164 - protein, 743 aa, Rosellinia necatrix partitivirus 14
MVFSSVRNYLTERIERVKKEWQIYQSSGSDPASTLETHSTLHDSDTRRYYNYAAKQPYLEHQSQMLQSEFDNLVRAFEIDNKNKHQPFELHKPTSPDWPYPENRIPAPGIKSVPLFYHTGHIIHADPTTSRPLHPDQETDSQESYIPGDIDFGPEIDPLLNELLIRKYPEYIPYAKKYCRPAGTTDATFRDFNKEQKPSAPIDPSRKEHVLKFIFHFLDCTPYLPIHFVDTQYAKTPLTTGTGYHNRFSYKQKAHAKYSHPKEYADRPTSKGFFYNATYENARTIIHKIKMSGVPFNLHFAPEATDLSDAQVQEYIDKHNDFFNDYPTLLFTRNHISDREKTLKVRPVYAVDDLFIIIELMLTFPLLVQARKPSCCIMYGLETLRGSNHLLDSLAQSYNTFFSLDWSGFDQHLPRVITDIYYTDFLRRLIVISHGYQPTYEYPDYPDLNERKLYERMDNLLHFLHLWYNNMTYLNVDGFAFRRTSAGVPSGLYNTQYLDSFGNLFLMIDGMIEFGFTDEEIFSFLLFVLGDDNTGMTLLPFPKLHEFVEFLESYCLSRYNMTLSRTKSVLTTVRNKIETLGYRANFGNPRRDTDKLVAQLLYPEHGINYKTMSSRAIGMHIASAGQDRTFSNFCKDVFYMFLPFHAPSEPTNLAFKRRFFGDLEETIPFFDSAEPVFPSLEDVRSLYANYAGPLKYAPKWNYAHFINDPDAVPSFAKTMHDFELEHNLVPRQAPTFATVSRLP

SEQ ID NO: 1165 - protein, 747 aa, Rosellinia necatrix partitivirus 15
MAYSSIRNYFAEATARIRNEWKNFQSSFEDPELTSERILDNDTRRHYQRIRVTEEQDAQILEAEYQHLKATFEHQNDLKFEPFELFKRPTDWHPLPENRIPAPGLVNVPVFYHTDHIVLADPETSRALSPDLISDYAESYIPGDIDFGQPTDPLIETLLSRKYPEYLHILDKYCRPAGTTDATFRDFNKEQKPSEPCTEEREERILKLIDHFLDIQPSQPLHYVDTQYCKLPRVTGTGYHNRHSFKRRAHAKFSHPQEYASRPTSKGYYHNATYEAARILIHKIKMTGIPFDVDFDIIPNMPEKHFKILISKYNQFFNSYPTMLFTRNHISEREKTLKVRPVYAVDEIFIIIELMLTFPLIVQARKPTCAIMHSMETLRGSNHLIDQLAKSFRSFFTIDWSGYDQRLPRPITDCFFLKFLRRKIIISHGYASTMEYPDYPELTPDAMYQRMDNLLHFLHLWYNNMTFLSADGYAYRRLYAGVPSGLYNTQFLDSFGNLYLLIDAMIEFGFTDEEIMAVILFVLGDDNSGLTSWPIARLLEFISFLESYCLKRWNMVLSATKSCKTTDRGNIESLGYRCNYGNPRRDIEKLVAQLCYPEHGIKYRTMSARAIGLAYASCMQSRTFYALCKDIHATFLPYLDPSEREILSLRRQLSPVDTSTELELDIDFTKFPSPEDILDMISHYHGPLPIHSKWNFAHFMNPPDYAPENSFTMYEYEQKNGLTPRTAPNLLHLNMLDSEQVDDLLGV

SEQ ID NO: 1166 - protein, 730 aa, Rosellinia necatrix partitivirus 16
MPVFSKLADLPSAQAVYSNVRSYFNERMSQSKLQWKIFQQEQKDPDEILARTQDSENLRIYNSFRSRFTERQQKDILDQEFQNLRANYETSNQRRNEPFEFYEPRDLNELPENRLPQPGIRAVPLKYHKGQTTVATDEVPESGFKIDPLLQELLIRKYPEYLWIPKRYCRPLGTTDATFSDFNREQKPSLPIPTERKERILSHILKRLHAEPYLPLHFVDTQWAKLPLPTGTGYNNRHNYKTNAHANFSHPKEYADKRTSKGYYINAFLEKSRTLVHFIKDQGYPFLWTWKSETPSDDEMLAFMRRLNRFFNEYPTLLFTRNHISDRDGNLKQRPVYAVDELFILLEIMLTFPLLVQARAPECCIMYGLETIRGSSHYIDSVAKSYDSFFTIDWSQFDQRLPRVITDIYYTDFLERLIVINHGYQPTYDYPTYPDLTPEMMFERMDNTLNFLHTWYNNMTFLSLDGFAYRRTHAGVPSGLFNTQYLDSFGNLFLILDGFMEYGFSDDQIDAILLFVMGDDNSGMTPLTITSLSNFLTWFETYALARYNMVLSKTKSVITIMRSKIETLSYAANNGNPIRPVEKLVAQLLYPERGLDARYMSARSIGLAYASAGSDRTFYALCRDVYHTFLPYADLSSDIDLMRTKSMLPGYLKALDPEDIPFSFMEFPTLDKIRQQYSKYLGPLDYAPKWNYAHFINSPNVIPPSSQTMHEYRMEHNIPRQDVPCLPEDV

SEQ ID NO: 1167 - protein, 725 aa, Rosellinia necatrix partitivirus 17
MRLSVPPFVQLEQPHSESHRRNVEYAKLLEKFRQNPTLTNRNALQSFADEQGFNYFLPVDETTFPEDRQPAPGIQALYGFRFHPLADTLRKWTDIPKTGYNPLKFIYELVTTMFCTYLAILVNYCRPAGDADAIFENFNQETAPVEPINPERLTVIMRLIHFFFRIKPTSPVAFPDLRFYRWTLTTASDYHARHSDDYKRDSANYWDHLRKHDNLEERFDYSERPLSKGYFFNTFLLTCRTIVHNIKYYGFPFKTDLDIDDPDVLQKSRFWFMKYPTMMFVRSQISKIDKLKVRPVYNVPMLFLFLEAMITLALMAQCRKPENCLLWGYETIRGGMQELNRVALDFTVYMMLDWSRFDQLAPYEVVYHFWCTYLPQIIRVDRGWMPTEFYSSAEHKVNFDLKDKNYADTPKYARFRSKLSGLYAPQVIMFSFIMYNLLSFLWFWYVNMVYVTPDGFGFVRLLAGVCSGLFMTQISDSFINAFLIIDAMLSFGFTEDEIRLIRMFIQGDDNILYFLGDFERVFAFYEWLPQYSLDRWHMIISVDKSSITRLRQRIEVLGYKNMNGMPHRDTSKLVATLAYPERYVTGPKWPIIMMSRAIGIAYANAGHSREVHDLCQRAYKHARKLSGLTHDELKSVEIDYGRLGMFEIFSVMIDEYESIVVTNLSVFPDFYDIRNNLRFWHGPHTVYPMWPRHFLDDLSTIQDEDELITLHDVMQSGGFTIRKHF

SEQ ID NO: 1168 - protein, 740 aa, Rosellinia necatrix partitivirus 18
MPFNTLRNYLAEKIIRVRNEWKIFQSTDQDPEQTLEQNQDSDTTRMYKLKYYNTKDEAKTRMLNQEYSTLVEAMRTDYQTRHQPFELHKPVDPDAPFREDRTPAPGIKTVPLFYHAGHVIHANPETSRPLNPDNETDAAESYIPGDIDFGPEIDPHIRCLLEQKYPSYLPYVHKYCRPAGTTDATFRDFNKEQKPSAPIDPARKEQVLKHVFRLLDATPYLPLHFVDTQYAKLPLSTGTGYHNRFSFRQKAHAKYSHPPEYAEKPTSKGYFYNATYDMARTLIHKIKETGVPFNFHFAPEDQDVSDEQVRDYIAKCDNFFNDYPTLLFTRNHISDREKTLKVRPVYAVDELFIIIEVMLTFPLLVQARKPSCAIMYGLETIRGSNHYFDSLARAYSTFFTIDWSGYDQRLPRVITDIYYTDFLRRLIIINQGYHPTYEYPEYPDLTEHNMYTKMDNLLHFLHLWYNNMTFLSVDGYAYRRLFAGVPSGLYNTQYLDSFANLFLLVDAMLEFGFTDEEIEKILLFVLGDDNSGFCPYDIGRMHRFLQFLEKYALARYNMVLSATKSVLTTLRSEIETLGYQCNYGQPKRPLDKLVAQLCYPEHGIKFSTMSSRAIGICVAAAGQDKKFHSFCNDIYTMFSPFWKPSPGLTLDMKRRFFADEEVDLPFLSDDTLMPFPSFQEVRKMYATYQGPLSFAPKWNFAHFIMPPDYCPTTRKTMHDYEQEHSLYVRIAPTFATSEHY

SEQ ID NO: 1169 - protein, 606 aa, Rosellinia necatrix partitivirus 19
MKFSNIKILGYKPEFAVPIHGRDPNVSNPLTDIYNKIVDNALNRFLTPDESDQVINGYRRSAWNEDALKEDINRLDSDEHPVDKDEHYEKALNHVYNLIKPEKPLQPVHFSDLRHYKWRISTNCGAPFNAMKRWKDYVVTKFKYFQRSQPFENIAHRDLFTEAHESSEPLEISDTRMTKHNLYNELFFIARKVIHRIKLGFTSNSQGESYLYWNTAFARQHLVSKDEPDKVRLVFGAPFTLLAAELMFIWPLQAHLLFMGEKSPLLWGYETILGGWYRLRNYFSRVIPYYGTVFTCDWSGFDRRARHTVIRDIQSRIMRPMFDFSQGYHPTHKYRDSSNPDPRRKEDDLPISEKLENLWNWMCDAILRTPLLMPDGTLLEFQHSGIYSGYMQTQILDSLYNMVMLFTILSRMGFDISRLKLKVQGDDSICLLLQLFIQLAAGFLTLFKHYATYYFGAVMNEKKSELLPTLDHAEVLKYKNKCGIPYRDELSLLAQLRHPERSTTPEALASRCIGIAYAACGQLPRVYMICEDIYNYLTQVRGTIPKQSELDFYFRYIEMSSGQIFRPTAARFPSYHETMSHLMDAHSPVAPSHWPLDHFIGRPGQH

SEQ ID NO: 1170 - protein, 755 aa, Rosellinia necatrix partitivirus 20
MISIFAIVLMHFKLKLWANSLRHGPNPKSDVWKIRNVYYEYKLREIHSTRIPIFDYSRSLLFLIDQILVTRLNNSYDDQLNAIQEKRMLREQPLNLYDSIELEDIPELRRSKPGILNLPYKYIEKSPGLAYSETSKSHVAFVEPYEAEEPLDRKAETYDVDADLSGLPAHPGIAQIIHEWFPMYTQYLDTYCRPPSYGPQAFYDFNRTIEPHPFPTAERNEHILSLLDPILAIKPFAPIHFADALASGIPLNTSGSYHDKNSPDIKIRSRISSPSLYARKPKSKGYSINSTLGYARTFIHNIKNYGTPSGETLSDSLQPDSVEQSKLKNFLLSQPTELFIRTQISKRDPNESKKIRPVYAVALLFILIEIMLTYCLLTQLRNPECAVMHGLETFRGSMSLIDQVALYFTSYVSLDWSQFDQRLPLYVVISYYAYFLPRKIIINKGYQATHFYPDTTFADPSAFAIKIFNLLQFLLIWYVNMVFISYDGYAFVRLLGGVPSGLLNTQALDSFGNLYIILDCLIEFGFSDLEIKNMIFFIMGDDNVFFARENFNRICEFMIFLESYAKTRHGMILSILKSVWTSLRSKIEVLGYTNNYGLPTRPIGKLVAQLAFPERPVPHDKNWMHAARAIGLAYASCAQDASFHLLCYMVYQKYKPSADVHVTARQFTRVIKYTVAELLGFTSDDGLIVFPEFPSLFTVHQQISHYHGHFSESDKWKETIFKDSPSDTSSDVVTLADWLKLNPEYSFRTDNIWQS

SEQ ID NO: 1171 - protein, 721 aa, Rosellinia necatrix partitivirus 21
MVFSSVRNYLQERQARIKYEWKIFQQAEQTNQDPSDLACLDSDLERLHYFARDRLLETQKSQILEHEFNGLMHSMQLQNNMKKRPYQFSSSEHFHGLPSNREPAPGIVNIPRAFHPGQIVSATEELPETGFELHPLIKYLLEHKYMHYQRTVDKYVRPLGTTDSTFADFNREQIPSAPIPKERKERIMKHVHKRLNTSPYLPLHFVDTQYAKLPLHTGTGYHNRHSFKTRAHAKYSHPEEYAHRATSKGYYLNAFLELARTLIHRIKESGLPFEFIFNEEQSSEEQFNALASQLSLFIDNHATMLFTRNHISERDKNLKQRPVYAVDELFILIEIMLTFPLLVMARKPECCIMYGLETIRGAMNKIDSIAKEKGYTSFFTIDWSAFDQRLPRVITDLYYTEFLESLIVISHGYQPTREYPTYPDLTEEKMFTRMSNLLQFLHTWYNNMTFVTADGYAYRRTCAGVPSGLYNTQYLDSFGNLFLIIDALIEFGCTDEEIEEILLFIMGDDNSGFTYWSIERLDAFISFLEKYALQRYNMVLSKTKSVITVLRSQIEMLSYKCNSGRPTRSLEKLIAQLCYPERGPKDKYMSYRAIGIAYAAAGMDNDFHEFCLDVYSMFKPFAAPLTEENLPFVKAYLPGYLKAPDLPEVLALGTFIKFPTIDEVIDVYSRYAGPLDYAPKWNFAHFINAPNVVPPSTKTIRDYRIEHEIPCPPVPTLPIIG

SEQ ID NO: 1172 - protein, 613 aa, Rosellinia necatrix partitivirus 22
MTENLTYVKYIPESMRSAPNVWKIARPAMEARNEWLERQMRKFYTDEEVDQVMTNRRSADSDEALMEDFFRCEFPKHEIPQDKNFNDAIELVTEHFRPERVLHPVSFPDLRNYPFELAVSAERPFTDPTFKFKPTDRDVDMETGVPKVSKRGAKKLKKWTKHTDVNTYLRWKQSVGLTDNSGVTYHNLYNEIFIYNRPLIHMIKEGEEPFWKDGKPIPYQELTLHMRSHVVAATEPDKIRAVFGAPKLLLHAELTFIWPLQASYLNGKSGRMLWGREMNRGGWRKLFQEMHRHGPPKTILGVDWSQFDKRLLHQLIRVVHKIWRQYFDFTKYERTNKYPNANPRDPRRIERLWEWMCNAITDTPILLPNGQVWRWNWNGFGSGFQQTQLMDTFANAIMIYTCLLAMGVNVRAKEFWARFQGDDSIIAFFERMFQLFGPGFLIMLEECAKHYFNAKLNVKESAIQSKADGMFVLGYFNNNGLAYRTDEDLLRHLMFPERPQDFGRLAASAVGLASASLGCSKPFYHLCKLIFNKIVHKKGYKVRWTALKWMIRAHIYENIDQLKKMEFPNYYDLCERRFAMTDRTESEMQNQWPTRPRTEESDFFFLDDITIPV

SEQ ID NO: 1173 - protein, 571 aa, Rosellinia necatrix partitivirus 23
MYWFTRFYNWLTDYHPRLSVNFKFIAWNEPKPVPPLNDLAFASYRKVVDFAFKKHLYGYDRDYIISSFHRAPPTPDLIYTALAKGDLPDHVIPQDEHFQRARAEAKKRFAPPKKVRPVHLFDLRHYPWKHKPSAEEPYTSNKELRRRLEEAARFKIIADARMSVGNLLNYIFDDVSKFVHNIKAGIIKPGESTPLVNVHVKTALTPIDEAKLRLIFGCSKRWIFPMCMFLWPLFRYYLYEQQSPLLWGYETILGGWHRMNSELLCSYLYYQTFVTIDWSGFDLRALFSLMRMIYADWEDYIDFDNGYMPTKRYPTSSTEPHRLKRLWQWCVEAHFASAFRMPDGSTWIRLNRGILSGLFETQFMDSHYNLIMIMTILDRLGFDISNIWIKVQGDDSITALRFHIPANQHRDFKIQFAYWAKYYFDHKCNDEKSETSNNLQNVEVLGYRNNNGYPERDWRKILAVLWNPRSRSPKPENTMARCIGLVYASIYDRNVVNVCRDVYEYYESKGFLPNSSPDTTLEFQFMFDEVDIPRDHFPTQLEVTRYLRSLNNVSDERKRRYWNPDWFLAEY

SEQ ID NO: 1174 - protein, 598 aa, Rosellinia necatrix partitivirus 24
MLNIQILGSFKSAAKAIVGHLTTPLRVETYNNIVDHALRRFLTPAETDEVINGYRRSVWSEDSLMNDINKLNSEEHPVPKDEHYWNAISHVQKMFTPETPLQPVHFTDLRKYPWQLSTSVGAPYATSKSWQNYVREKFNGYKNGDPPSKFTKPYYRDLFAEAHKGQSLDPPMLDARMTKRNLYNELFYITRKQIHQIKDGITEFKGRSFKYWHTAFARRHLVSKDEDDKVRLVFGAPFTGLCSELMFIWPIQAWLLSLGEKSPMLWGYETLHGGWYRLRNFLTRMAPRHELVATLDWSGFDRRARHTVIRDIHTKILRPMFDFTKGYHPTFDYPDSSTDTYDAQRTETLWNWMTDAITSTPLMLPDGTLIKFVHSGIYSGYFQTQLLDSIYNLVMIFTILSRLGFDLDKVVIKVQGDDSIFMLLCCFILIANWFLTMFKHYALYYFGAVLSDKKSEIRDSLEHAEVLKYRNRNGIPYRDPIALLAQLRHPERSDTLQALMARAIGIAYANCGSDPRVYQICEDIYLYLANKGFTPDAKGLPSGLRFIQTHLPGGDETIDISRFPTYYETVLPLMNIERETLSDKYWPTSHFIGIPGRA

SEQ ID NO: 1175 - protein, 733 aa, Rosellinia necatrix partitivirus 25
MFLPSIRDIYSEAQSRIRKFNQWFHNSNDDVPEHSTSVLLDSQHNHEFPDPESLRHYFERIEKDTSHRIFNDEEARHNAKQTYDKYVERDVQKGEPFEFYTSIHHDDIPPERYPAPGITILPLKFHSGRTVEPTDEVPVTGHSMHPILEYLVTHKWYHYKTYTDTYCRPLDTTQATFDDFNKEQKPVDPIPQSRIDFVLPLVIHFLNALPYLPLHFVDTRRMKMPTHTGTGYFNRFSYVMKTHAAYSHPHIYEQRPTSKGYFYNAMYHYSRTWLHYIKKFASPGPLVYNSTQYLKSLRTFFTQHATLLFTRIHISMRDGALKVRPVYAVDDFFILIEGMLTFPLHAMARISINGTKSCIMYSFETIRGGCLYLNQLAMQYTSFLCIDWSSYDQRLPRVITDIFWTQFLRSLIVINHGYQPTWEYPSHKDLDEHALYQRMDNLLHFLHTWYNNMVFVTSDGFGYLRDYCGVPSGLLNTQYLDSFGNLFLIIDALYVFFSERGLADPDIRKQILQIVFFVMGDDNVLFTKLDLDTLYAFLVFLESYALSRYNMVLSKTKSVLTVLRSRIEILSYRVNNGKPIRPIYKLVAQLCFPEHGPNDKFMSARAIGIAYAAAGQDPDFHEFCSDVYSMFKPFSVQLTPENIERAKYHLPGYFKMFDNIAEEIPFDHFPTIDEVLAKYSTWQGYLKLDKKWDPNWFVNPPYAVPPSSKTMADYQTEHSLPTRDTPYLFNQHA

SEQ ID NO: 1176 - protein, 584 aa, Rosellinia necatrix partitivirus 26
MPAPNLRYIRTLLTRERPKAYPLKTTWLMDRTRRRAVLKAFYKYLPESIVDEVKNQRRSEYSDESLTEDFFKNEQPEINLNRDFHYRKALRVMTKLFKPKRNYKPVAFPDLRYYPWNLRTSAEAPYTHSDFWNSYLRNKMFRKEILDAAPSFHNLFDELFIKNRNLIHMIKDKHSAFFDSHGIPKPYYWVTLHARSHVVGPDEPDKIRAVFGVPKLLLFVENMFIWPMQADLLNRDPEHSPMMWGCEISRGGWKRLRRLIHKKTGSKFRTVLSADWSQFDRRALFSIIDDTHDIWHSFYDWDGSYAPTTYYPDAHTDPQRLQNLWDWFTHNVKYYPIALPNGDLYQWTRNGIASGYQETQLMDSWVNGIMLLTSLSELGVDIEHNHFFVKLQGDDSIACFSEGFFRIYGKQRFLSKLAEIALKRFNAKLSVDKSDVSDRLDGTYVLGYYNTSGLAWRTDVDLLSHLLFPERSQDLAATAATAVGIALASMGCSRVVYDICKDLFDFLTIDLGVVAKPDPTMMRQILHTHGGIYGFPISEAGTIMDFPSFDTCYFQNYVLDGRSETERERTWPTDPERSGGFAFL

SEQ ID NO: 1177 - protein, 709 aa, Rosellinia necatrix partitivirus 3
MVFSQVRDYLHELRNTLNRDWRLYRIFGETTPDPDSEQPDIDLRRLDKSYRQRDLEAQLTSEYKQHYTDARYAFEESDHLKGEPFEFSIPSSEPLPENRLPAPGIHALPIRFHKEQVVTATEQVPETGYGLHPLLEYLLSYKYPRYMEHTIKYARPLGTTDATFSDFNREQTEFPPIPANTMTRILPLVCILLNAKPFLPLHWIDTFFTHMPLVTGVSYFYRHSYELRTHAAFSHPKEYADKQTSKGYFFNAFSEWARTVVHRIKEFGYPFSTENLSPTEIYDKMRTFVIQHATSIYTRNQISERLGNLKQRPIYAMDTLFLHLECMISFPLHVMARSIDSAIMYSFETIRGGCAFMDIQAKKYKSYLCIDWSSFDQRMPWIIVDTFFTVFLPYLLIVNNAYHPTYEYPDYPGLTADKMYSRLFNIICFLRLWYYNCVFYVADGYAYVRRFAGIASGMLNTQYLDSYCNLVLMIHGLLHFGCTDEEILQICFFVMGDDNVLLTHWPLSRLNTFLNWFEAHALSRFGMVLSRQKSIITQIRTRIEMLGYQCNGGNPKRSIPKLVAQLCYPERGPDPRYMSSRAIGIAYAAAGSDPTFHNFCKDVYLTFLPYQEDLTTEHAAHRARRHIPGYFSYLFSHEPSFDIDLLTFPTIHDVRSRYQRWQGELDQDSKWNPSHFKFQPDYAPSNSITMSEYMTEHSLFFPDVPTLFT

SEQ ID NO: 1178 - protein, 744 aa, Rosellinia necatrix partitivirus 4
MAFNSVRNYLAERLARVKEEWKLFQSHHSDQTETAQAHEDSDLRRYYKAISSDPTNEVKNRMLQSEFDNLKAAMRIDNESRSQPFELHSQPHPDAPYPDSRLPAPGIVRVPLFYHSGHVIHADPLTSRPLNPDLDADQLESYIPGDIDFGPEIDPILYALITQKYPTYLPYINKYCRPAGTTDATFRDFNKEQKPSAPIPEDRQEAVLSHVFRLLDATPYLPIHFVDTQYAKTPLVTGTGYHNRFSYKARAHAKYSHPAEYADRPTSKGFFYNATYENARTIIHKIKESGVPFNLHFAPEDADLSDAQVQQYIDSCNDFFNDYPTLLFTRNHISDREKTLKVRPVYAVDDLFIIIELMLTFPLLVQARKPSCCIMYGYETIRGANHLLDRLARSYETYFTIDWSGFDQRLPRVITDIYYTKFLRRLIVISHGYQPTYEYPDYPDLDAHKLYTRMDNLLHFLHLWYNNMTFLSVDGYAFRRTSAGVPSGLYNTQYLDSFSNLFLLIDGMIEFGFTDEEIRSVLLLVLGDDNTGMTSFDLKRLKEFISFLESYALARYNMHLSKTKSVITSLRSKIETLGYSCNYGRPKRPLDKLVAQLCYPEHKIKYHTMSARAIGIAYAAAAQDITFHTFCRDVYTMFSVFYKPDVRSNLDFLRSVLSDLEVPLAHFDSSTLPPFPSFEQVRARYASYQGPLQYTPKWNIAHFKNMPDVIPETGEPVMTMHIYEKLHGITPRMAPTFSTVVPST

SEQ ID NO: 1179 - protein, 647 aa, Rosellinia necatrix partitivirus 5
MFFKHTMHRFNKRTTTLRPTKHETPHSNIRYIGTPKQRYQKPDYRQELKEEAERERAEWLERQMRKIYFDEEVNQVLTNRRSEYSDERLIADFKESDQPLHPIPRDSHYDRAVKMTAEHFRPARELNPVHFPDLRYYPWPLSISAETPWTSEGFRFVPAFRDLDSETTKPKFGGAKQRAEKWKRFAHFVYRNFGSGSINVLQYLKLKQRFGLIDNSRTTFHNLYDEMFQYNRGRVHNIKDGEGAFWKDGKPQPYFWNMLHARSHVVAQDEPDKIRAVFGATKLLLMIELMFIWPLQASYLNGGSGRMLWGYEMTRGGWKKLYNEMHKRQPFNTILGIDWSKFDKRLLHELIDQVHQIWRSYFSFDRYEPTSKYPNAKTDPARLERLWRWMCHAIRRTPIMLPNGELWEWFWNGFGSGYQQTQLMDTFCNCIMVYTCLSALGINIESDRFWSKFQGDDSLIGMLERMYLIYGNHFLDMLADSAMHYFNAKLNVKKSDIQDRVTGMTVLSYSNKFGICSRTEEDLLRHLYFPERERDYAKLAASAVGLAIAAGGEHERFHRLCEKIFVHITKKWNLRPKWKAIQWMIRAHHFGSEEELYRAKFPDRLKLMSEVYAYKERSESEKQRQWPTYAKEEGDFYFLEPVQPASV

SEQ ID NO: 1180 - protein, 608 aa, Rosellinia necatrix partitivirus 7
MPNLTFIRKLNNYEMPKRYDDDRQQSMDFRNQWLERQMRKFFTKEEIDQVLTNRRSDYSDEALINDFKRCEHPYHEIPLDYNVQTAIDAVTEQFRPNRVLHPIQYPDLRYYPWTLNVSAEAPWTSYNFHFVPMDRSVDFESTQPKLIFDINQVNKLRKFSKPTDVKTYLRWKQQVGLIENDHITFHNLYDEIFIYNRPLIHQIKEGEEPFWKDGQPVPYLWNTLHVRSHVVAHNEPDKLRGVFGATKLVLQTEQPFIWPLQASYLNTDAGRLLWGREMSKGGWRKLFSEIYTFGPPSTVLSTDWSQFDKRLLHQLIRIVHRIWRSYFDFTRYEPTNQYPNANPRDPKRLERLWDWMCNAITDTPILLPNGEIWRWQWNGFGSGYQQTQLMDTFANAIMIYTCLTALGVDVTNPKFWARFQGDDSLVAFFEQMFRIYGNDFLIMFSAVAEKYFNAKLNVKKSSILGQAHMATVLSYPNWHGTAFRTDEDLLRHLMFPERPQDLGRLAASAIGLAQAALGCSERFHNLCEYIFTKLVKGKGVKVKWQALKWMVRAGQFETIEQLKRTEFPTIEELLSQAQIPAIRTESERQRIWRTTPLSKDSFHFTHDI

SEQ ID NO: 1181 - protein, 753 aa, Rosellinia necatrix partitivirus 8
MLTLFTIVTLNILLRFQQRRRRNETTSTLIHPIRNILFEWEFRRSIPLDASPYPVFDYSKSLLAYIDLITCHKISIHLKEDIYTLEERYSSRDENFHLYEYITDADLPPDRQPANGISHAERRYHSIPSGSLNVNDKIEVISNDPDFIETNEFRSNILFAESLDLTGSPPHPQIEKLIQDWFPQYVPYLHEYCRPPSFGPQAFLDFNRDTPDPQPPTPERHEAIMRIVRLKMNIKPYRPLHFADALAAETPLNTSASYYSKFNPETRVLARYSTPSRYSDMPTSKGYFINVMLNEFRLEFHHIKYDGMPFPTDRHDHETNLTILDTWLAKHPAQLFIRTQISKRDPSDPKKIRPVYSVDDRFLHIEKTVSTPLLAQMRNPQCCVAHGLETFRGSMSLIDKIAHFFLSFISLDWSQFDQRLPYYVIIAFFLDFLASLIIVSHGYMPTRSYPDTKSDIHSFARRQYNVLVFLTTWYLSMTFLSFDGFAFIRIHGGVPSGLLNTQSLDSFGNMYIITDCLLEFGFTEQECLEMLFCVLGDDNLIFLQHNLERITRFMVFLERYSKDRHGMVLSILKSMFSNLRTKITFLSYENFFGHPSRPIGKLVAQLAFPERPVPPAREWIHAARALGLAYASCGQDPTFHLLCKMVYERFRPSVPVPTLHINKIFKKWKYQLPDFDIEELEYTFPDFPTCTEIFALVSDYHGVFSETDKWNFNVFTVPPSDNLPDYVTLKNYIQQSPDVSHTVNEFWHGKRPF

SEQ ID NO: 1182 - protein, 614 aa, Rosellinia necatrix partitivirus 9
METITSMFNRINRFFTGSNNLEFVGTYHHHPQTPVPNLNNIRAHQVTLEKAFDKYLTDAEIKHITQALRRSQTTQDAILADFFSGDVEPHDIPWDQHTEIGLQAMLDAFRPPQKCLPAHLNDVEHHYPYKWQVNAEPPFVSDDYFLDNRKTFGDFWNPVTKQWTGYVNPLDMTRRHGTEPSDMLLSQVTPPKFGFMKGMIFSWTRRWHHIIKKGFSDTTGLENTSYFQRRFIFPMLLHTKTAIVKKDDPDKMRTIWGCSKPWIIADTMLYWEYIAWLKLNPGSSPMLWGYETFTGGWLRLNARSSFITIDWKRFDKKAYFSLIHRIMQGTRQYLDFSRGYIPNFVYHEHKDWNQSKELGLHRLWEWTLENLFNAPIVLPDGKMYKRNYAGIPSGLFITQILDSWYNYTMLATLLSALGYNPRESIIKVQGDDSIIRLGLLLPPNTHDEFLTKMQNLADHYFKAVISLDKSNVRDTLNGCEVLSYTNNHGWPRRNEIEMLAQFYHTKANNPTPEITMAQAIGFAYAACGNHDRVHTVCKDIYEYYHRQGFTPNPAGFTLVFGDSPDRPETPFKLDHFPSVAETQRYLTYTEYRNKEQDLRTWPTSYFAYLPCARP

SEQ ID NO: 1183 - protein, 578 aa, Sacamano partiti-like virus
MNNIEFIKQATNTEVAQGIIEFRGNQINHLNQKTVKKALYKHCSPELANKVIHGYRRSSSQPQAIEADFMKSNVEYIDIPRDIHYQRAIKVVTKMFKPSRTLKPVSFPDLRYYPWHLSVSAEVPFTINDKYIKIVAEKQRDGECDGKLTFHNLYDEIFYLNRALIHQIKDKDPQFWKDGVPKPYYYHTLHGRAHLVESHEDDKIRAVFGVTKLFLFAEAMFIWPLMKELLNGKTDSPMLWGYETIKGGWRALHSLLTSRNLNTFISADWSGFDRTVRHEIITDIHNIIRSYFTFEEGYEPTLAEAQGDARLGYPQSSTNAERLENLFEWMSYNTKHTPIKSPLENIYKWKHSGLASGFLQTQILGSMINATMLLTSLSALGINIEAKNFTLKVQGDDSIIGFAEREATINKEQFLEKLASETKRRFGATMNTKKSEIQNTVEGLSVLSYRNKGGYAYREEDKLLALLLHPEKSATPEDLAASAIGIAYSSMGSSKTVYNVCKDVHDFLTNKMNVKPNFRSWEWTIQMNHEELPFTEEFPTFQQLVELNTVYQPRSETAKQRMWPTRPKGEFGFHFVDD

SEQ ID NO: 1184 - protein, 486 aa, Saccharomyces cerevisiae partitivirus 1
METGYQTLFRYVFGSYKNVDLKQGFGTKRIEPSPFIKVPGYEDWWRDVTDRSSMEARFDAFSTPITMHIDEDLFSEAVNDVYYMFFKHYGAPLRVSSIDESISKLPNDTAAGLPFKPGVKKGQVWSELRQLVVRSWREVKSSHRLSVLPCKAGARRQLRERGKNKPRLIFAYPGYLNIIETQFTLPFTEKPPPFLGWSLNWLDNGCSVSRLKRMACKGGSVANLDFSSFDSSVSSHLIRSAFDIVRSMLLMNETESEMLKQLEDYFIHTPLLMYNTVRVKHRGIPSGSGFTQLIGSIVNAISCVYVSKLSSEFRIMQDHCVWLGDDSFLVFDQGLSKDDFIESFLSNFSKLGLNVNADKTEYTKPSIGCSFVFLSRRMTYGKTGMTPDLKKLAGQITWPEFKDKTPADTIQRLIGLAWAFGFNEQAYRLLLNSYVHVVKENRIRRVQPDLRFYRRFQLMDFRDINLSRFPNFNEICNRYYGKDFIS

SEQ ID NO: 1185 - protein, 491 aa, Saccharomyces cerevisiae partitivirus 3
MLRRNFANFSDLKLGGGFSTKRAELSRFIQYRFVKEEYWRDVTSRSAMDERWNAFHSPISQSVDESKMDIAFEKVLDLFQSHYSEPLNTVTIEEAIQLLPSDTSAGAPYLPGVKKGEVRNHLKAMSRYAWRNLESKGFLPVTPAIAAARRTIRAKGTNKPRLVFAYPGYLNIIETQFTAAFSENAPPFLGWSVNWLDYGTTYDDLVRRIYSGRVWMNLDFSSFDSTVSAYLIRIAFQVVEELMDLSDLEKSMLDELMTYFIHTPLSYYNSVEYKHRGIPSGSGFTQLIGSIVNMLACVYAFECSPEYGDLVLSSCIWLGDDSCLVFRYGPPKDEVEDFVIPHLRRLGLQANPEKTLYNFVSPSMQYHFLGRKAFLGVRYWEVDLDKLHAQICFPEFQDKSISDVIQRLIGLAWAFGCNLDAYEVLNEAYDFCSRYKRNEIEDKINYKSRRLLQMYGIQDVNLSVFPSYEEICYRYYGTVLYPPRLIFEYCC

SEQ ID NO: 1186 - protein, 747 aa, Sarcosphaera coronaria partitivirus
MPFNSVRNYLAERLQRVAKEWKFFQSSHQDTDRTQELISDEDTKRSYARLYQPNREEKERMLNTEYSTLVEAMRIDNQSRNQPFELHRPRTPSDIIPESRLPVPGLKLLPLVYHSGHVIHANPYTSRPLQPDEETDNAESYLPGDIDFGPDIDEHLYQLIIQKYPEYLSYINKYCRPAGTTDGTFRDFNKPQVPSEPIDLQRKEHVLKLVFHFLDCTPYRPIHFIDTQYTKTPLVTGTGYHNRFSYKSRAHAKYSHPDEYSDRPTSKGYFYNATYEHARTIIHKIKESGAPFNLYFAPEDQNLSDEQIQQYIDQHNDFFNDYPTLLFTRNHISDREKTLKVRPVYAVDDIFIIIELMLTFPLTVQARKPSCSIMYGLETIRGSNCYLDNLALRFETFFTIDWSGYDQHLPRIITDIYYTDFLRRLIVINQGYAPTYEYPDYPDLTPRLMYEKMDNLLHFLHLWYNNMTFLNIDGFAYRRQYAGVPSGLYNTQYLDSFGNLFLLIDGMIEFGFTDDEILAIILFVLGDDNSGFTNWPLPRLYAFISFLEEYALRRYNMTLSKTKSVITCLRSKIETLGYRCNFGHPARPIDKLVAQLCYPEHGIKFHTMSSRAIGLAYASCMQDKKFYQFCKDVYTMFLPFHRPDERATLQLRRLLAITDNDDVSIFTSDPPSFPTELQISTLFRSYQGPLSYEPKWNYAHFILAPDDLETPIIDNDYVIVPPFPMTMYEYEQIHDIPVRSAPTFING

SEQ ID NO: 1187 - protein, 464 aa, Scaphoideus titanus-associated partiti-like virus 1
MNDEKTVKLVRRLQPYSIACSGSNEDPFVRAIVNDCVDSETLDRLSEYTRGLYSTELHYESFMFFNRPVKDDNLFSTRVTSHPSFQPALQQTRDQLSCVRGTSIIRPDHFDEVSWIPSSAAGFGYVGLKKDNYLLARKNATRALYGFSKYRDSYRFVPDKAYARTQLALRANPKIRHVWGRAFHHILIEGLIGQPLIDKLMLNDTPIYIGRDIHKDMPYVILKAIQDGGTCYCIDFSKFDASACSGLVHIAWTILHELIVINDHVDRLVFDFCYSLFTNTPVIMPDGKLFIVRSGVPSGSYFTQLIDSIVNMLMINMLCYTTSVSFPSLKVLGDDSLFVTEVPIAELPEIGAFFAQFGLTISDKTVITENFSEIVFLGHNFYGSRVCRDEFTCLSLALYTEDPITSAVESVVRISSLLYDCGFNSFVLLNLYKRLLSTHHINWDLEAVRPASVHPPFVKLFVLG

SEQ ID NO: 1188 - protein, 704 aa, Sclerotinia sclerotiorum partitivirus 1
MDSIRNIFQELRQTNVLEWKLFQKFGQTTTNPTYSHPDADLRRIQETFRDPHLERSQTQEFKLHYTDTYSGFRESDLSKNEDFEFYKPIDPSSIPASRLPAPGISVLPIRTHAEQVITATEQVPETGYQLHPLLRHLIVSKYPLYMQHATKLCRPLGTTDATFDDFNREQKQYPPIEPELALRIVRIIIHLLYALPFLPLHYIDTFFCKMPLHTGTSYFYRHSYELRTHVAFSAPSEYENKQTSKGYFFNAFTSWARTVAHRIKEFGYPFDPTQLTPSEITDKLRSFFMEHATMLFTRNHISDRDGALKQRPVYAMDTLFLHLEAMITFPLHVLARSSRSAIMYSMETIRGGCARMDALASSCQSYLCIDWSSFDQRMPWIIVDLFFTLFLPLLLIISHGYQPTAEYSEYLGLTPDKMFSRLFNIISFLRLWYYNCVFVTADGYAYVRRFAGIASGMLNTQYLDSFCNLFLMIHALLHFGCTNEEILDFIYFVMGDDNVILTQWTIDRLFSFLTFFESHSLSRFGMVISTKKSVITSLRSRIEMLGYQCNCATPKRPISKLVAQLCYPEHGPNDKYMSSRAVGMAWASAGYDAEFFAFCKDVHTLFTPFAAPPSEQTTQTILKHLPGLFKMLDDVTEFTNPQAFPDIMTVRNRYATWQGELSPDKKWSRAHFLRRPDDTPLPFQTMFEYMSEHGITFPEPQQLF

SEQ ID NO: 1189 - protein, 553 aa, Sclerotinia sclerotiorum partitivirus 3
VFPVYFLLHFRKQYMNKNVIYDDPVDAVEPFLGDNKETFLLWDASSSSRSRVTANTDFIEQPGLKEIARYGGYSTYSAPGNTDPWVRLALKIHDRERYDRIYGFTRRPAGLEGMYKALFRFGEQVNEFKSLSFDQRNCMRSAIKSARSAFRLPVKHEPLEWEEVGQYMRHDTSAGVTFPGKKKGEVAAQIYTEARWLGHRMKQGGKERFDPRKVRFPPCLAAQRGHLSPRDDPKTRLTWIYPAEMLVIEGLWAPVMYHQFMSLPNGPMLCGKSSQRLYTEWIVNYREGEKLHGLDFSAFDSSVPQWLIRTAFDILHQNVDWLNWRGKPTTKRSRQKWRNVWDGMVWYFINTPILMPDGRMFRKRRGVPSGTWFTSLVDSVVNYIIVEYLTKCQQVEAKNLKVLGDDSAFRSGKALDLEQSQKDADVLGMNLNVKKCDVTEDPTEFKLLGTTYRNQRAYREDDDWFKLLLYPENPPPDIGTSLSRLVGLWIGGAMWSHEFCRFMTFYQSCYECPTDGTFTKDQRRWLEIIHGGSAPRGWTSKKSLFWRSIFYTI

SEQ ID NO: 1190 - protein, 580 aa, Sclerotinia sclerotiorum partitivirus S
MPALNLRYLFSISRSEMKKIRSSHTKVSPREEATRFSILKHAILKHGSVGLLNQVLLGKRRSDASDERLIQDFHEFEQPVHPVPRDKHYLRALRVTEKLMKPAKTLHPISFPDLRYYPWTKNVSAEAPYNFEKKYEELLRDKQRLGEIETATATFHNLEDEIFEDNRYLIHKIKEGDSQFWDKDGKPRPYYHTTLHARAHVVGHEDADKIRAVFGVPKLLLMAENMFIWPLQAYYLNQDTTKHHLLWGNEIMKGGWKKLWGQLQNGRISRTILSLDWSEFDKRALHEVIDDVHSMWKSWFDFTHYEPTIFYEKGEIPEPHRRIENLWIWMTDMVKHYPILQPDGKVYQWTRNGIASGFQQTQLLDSFVNMIMLLTVLSANGINIEHPDFWIKVQGDDSLISIVERRFQMFGISYLDTLADLASYYFNAKLSVKKSFISDTPQGQYVLGYFNHYGIPYRLDDDLLSHLVFPERPQRLEETAASCVGIAMASMGCSKVVYSICDDAYTFITKTLRRPAKAGSLFWLERAFGYEMPNIAKMPTFEECLYASYDIPVRTENMKQRLWPTNAKAKNGFYFLRHLC

SEQ ID NO: 1191 - protein, 675 aa, Scutellospora partitivirus A
SDPEPELDLRRLNYSYRQHDIESQLTAEYRQHYTDARYAFEESDHLKDEPYEFYTPSSDPIPDNRLPAPGIRVLPIRMHKERVVTATEQVPETGYGLHPLLDYLLSYKYPRYYEHTVKYARPLGTTDSTFNDFNREQTEYPEIPTDLMSRILPLVCILLNAKPFLPLHWIDTFFTHMPLVTGVSYFYRHSYELRTHAAFSSPKEYKDRQTSKGYFFNAFSEWSRTVVHRIKEFGYPFSTENLSPPEILDKMRVFVIQHATSIYTRNQNSERLGNLKQRPIYAMDTLFLHLECMITFPLHVMARSIDSAIMYSFETIRGGCSFMDIQAKKYKSYLCIDWSSFDQRMPWIIVDTFFTRFLPFLLIISSGYHPTAEYPAYPELTSDKMFQRLFNIINFLRLWYFNCVFYVADGYAYVRRFAGIASGMLNTQYLDSYCNLVLMIHGLIHFGCSDEEILQICFFVMGDDNVLLTHWPLSRLQSFLDWFEAHALSRFGMVLSRQKSIITQIRTRIEMLGYQCNGGTPKRSIPKLVAQLCFPERGPDPRYMSSRAIGIAYAAAGSDQTFHNFCKDVYLTFLPYQADITDEFQRAKAIKDLPGYLKVLMLYEPSFDINLSEFPSIHTVRSRYQIWLGELEQDSKWNPSHFLKSPDFVPPSPQTMQEYMDEHSLSFSAPADLFA

SEQ ID NO: 1192 - protein, 531 aa, Scutellospora partitivirus B
KHCLPEIAEKAINGFRRSKGSPVDIEIDFKRTNRKYFPVKRDYHYHRALRVVEKLFRPHRKLHPIAFPDLRYYPWTLSVSAEAPYTLFPKYQDLLREKQRDGEISDNRTSFHNFYNEIFNDNRKLIHDIKKGYPQFWDKTSGLPKPYYFTTLHARSHLVSSDEPDKLRAVFGLPKLFLQAENMFIWNLQREYLNYDDNPMLWGFETMKGGWRKLFHRTSHKRINAVLSIDWSGFDRRALHEVIDDVHHIWRSWFDFTLYEPTNFYPHAKPDPEEIERLWQWMTYLVKHYPVLTPTNKLYQWTHNGIASGFMQTQLLDSFVNSIMILTCLSAAGVNIDSENFQFFVQGDDSLCIFAEQLYTLYGQTFCSKIAELARNRFDAKLSVKKSRFTPSLDGQTVLHYDTRHEGQAFRPDEELLAHLLYPEHPQDLSATASAAIGIAQAAMGCSHQVYNTCKDVFNFITNELGTKVKYASRLSTERERRNLPPLPTKFPSFDSTFSQNYSTAVRTYSEKQRTWPTDKTSAGGFYFLNK

SEQ ID NO: 1193 - protein, 596 aa, Setosphaeria turcica partitivirus 1
MLNNLVLGTKRGLAKAIRGNIQDNHVIDAYHHVVLHALNRFLPQHEVHEIVHGYRRSVFNEDSLNADIQKLNSEEHSVPKDEHYWNAIRKVQQIFTPEIKLQPIHFADLRHYPWKLSTSIGAPFATSKEWNTYVVDKFHGYENGFDESTFLKHYHRDLFAEAHSGISLDPPMIDARMSKRNLYNEMFFINRKHIHLIKDGRKTNDAGHDLRYWHTAFARQHLVKQDDPDKVRLVFGAPSTSLMAELMFIWPIQAWLLSLKERSPMLWPFVTLTGGWHRLVNCFQKFCPSFGLVATVDWRGFDRYARHTVIRDIHSNIVRPMFDFSKGYHPTRDYPETHDTSPDRLENLWNWMCDSVLTTPLMLPDGTLIRFQHSGIFSGYFQTQLLDSLYNLVMLFTILSRMGFNLDNVYAKVQGDDSIICIICSFLMVSHWFISMLRHYADYYFGAVVNDKKTEVSDSLEHVEVLRYRNRGGIPYRERTELLAQLYHPERAITYQALMARTIGIAYANCGSDPLVYQICEDIHQYLSNLGVKPDPAGLPSGVRFVQDYLPGQTSIDVQRFPSYFETVSRLLDGYDEQPSEGYWPRSHFIGIPGRT

SEQ ID NO: 1194 - protein, 424 aa, Sichuan mosquito associated partiti-like virus
MSKTDAFERELACGCTRIVLPSVPPTLERHSARCPEAQIRRYMAPHPFNVNKERMDNAFGKTLSWFKSKFSPVRVYHPLDVLDTLSKPTSPGEYFKQKGYATKRDVISDQRGIDLLRTGISYMKRGITKADRYRTLVVVTDASSEIGNPSNVKSRVAWVYPLIISAVENMFYNGFNIQLPDDWVPNPTTHHKRYCGKKSKSMDFSKFDSSIHAKLIDMAFSIISSLIMFDGYYVGSDGETYGTYKIKEIERLWSFIQYYFVYTPFYTQANPNTRRKHHGVPSGSMFTNLIDTIISRIVTIYMHDGCDVTTYGDDVHVAQCKCNEDRLVCEAASMGLKVKIEPPNKHGCLTYCKTECHLGHPFHPGIWFSNVLNKARTKYMKMVVECLMHMQPTHDQLAWLQKKYKSLRSIPYRVHARLKLWLDK

SEQ ID NO: 1195 - protein, 572 aa, Sichuan mosquito associated partitivirus
MDKIKTQIKLKDEGKDTYELFELLDVTRLPRCRIPTDGIKIVPLKYHRQKVDRIPDEDDNVGDETHPDIHDTIHRKYPKFIPALTNWCRPHATTEAVFRDFNRAQFPVKEVDPQRLQTIMELILWALDVKPYPVLTFNDVLFAKLPLNTGTGYYHKRSYAATSHAKYSSPDEYKDLTLSKGHFINYHYPLFHSHVHSIKRHGLPFRIDKQPTTREEWKKISIRLQYYFNCRPTNLYTRLHISKRAKDEPKKARPVYGVDDGFLHLEAMYTLPLIVQARKMSCAIMHSLETLRGSNHYLDQVAQDYKSYLTIDYSRFDQTAPRVITNKYFTEFLPRLIFINGPTQRTIAYPEGKGLLKESYFYRTVNCLQFLHLWYNNMVFLNADGYAYKRTCAGVPSGLLNTQELDSFVNLFVVFDSLLEYGLDSETIKTFRFFVMGDDNSIFTPLDIYELNKIFKFIIHYVNERWNMTINGDKCIITDNRQYIETLSYQCNFGRPKKNIIKLCAQLCYPEHGIVEKYMSSRAIGLAYASCGQDKTFYNLCRDVYDLFKDKAEYDDKIKYKMTKYLPGTIKL

SEQ ID NO: 1196 - protein, 277 aa, signal crayfish associated partiti-like virus 1
MVEKRFAYPLQKAMENAPFPRSWGSGWDWFSAGGAQMSPFIDGPSLSVDFEAFDQCPPPWLIRKLMLRIMTLFELTAQEKAIFIGILRSHLDSVAHYKGRDFKLTGGVRTGSSFTHVLGTLLSDILCKYYDPDCENITYGDDVVMRSASRVPRIIDFFARHSSFSISLSKSKVGVHWLGYQWTGDRWILEDPDKRWAQFFWPERPSSPVARLQCMLLNCLSDPCRDLIIRALMELDGDTVLPETIALIGGPRFHAALDEGVNIFFAERCVKRFHRLD

SEQ ID NO: 1197 - protein, 478 aa, Sinapis alba cryptic virus 1; identical to SEQ ID NO: 602

SEQ ID NO: 1198 - protein, 753 aa, Sodiomyces alkalinus partitivirus 1
MLAISTIVALNVLLRFQQRRRRKQTAQTLTFPIRNILYEWETRRSIPRSQEPYPIFDYSKSLLAYIDLVTCHKISIHLHDEIDAIRTKYQQRDEDFDLHTDVPLSDIPEDRLPLEGINFANKRYHSIPSGSQNIGETIHVVQLDSNFVEDEDHRSNILFEESLDLSGAPPHPEIQKIINDWFPQYAQYLREYCRPPSFGPQAFHDFNRATPSPPPPSNERHEAIMRIVRAKMNIKPYRPWHFADALAAETPLNTSASYYSKYDPRTRVLARYSSPQRYSDMPTSKGHFINVMLNEFRLEFHHIKYDGVPFPPRHEPSDELNAGNEQWMSKHPSQLFIRTQISKRNHTDPKKIRPVYAVDDRFLHIEKTLTGPLLAQLRNPDCCVAHGLETFRGSMTLLDQIALLYKCYISLDWSQYDQRLPYYVIVAYYLDFLASLIIVSHGYMPTRSYPDTSSDIPSFANRQFNVLIYLLVWYLSMTFLSFDGFAYIRRHGGVPSGLLNTQSLDSFGNMYIITDCLLEFGFTEQECLEMLFAVLGDDNLIFLQQYLERVTAFMAFLDQYSKTRHGMVLSILKSMFSNLRSKITFLGYENNYGYPSRPIGKLVAQLAFPERPVPEKREWIHAARALGLAYASCGQDPVFHLLCKMVYDKFRPAIAVPSHHIMKIFKKWKFQLPDFDIEDVTYTFPDFPTVHKIRHDVYGYKGFFSETDKWNFDVFDVPPSDNLTDYVTLKDYILSDPDMSNTVHEYWHGKRSF

SEQ ID NO: 1199 - protein, 520 aa, Sodiomyces alkalinus partitivirus 2
LIDALHLRPAKSGSTTSEDVLSSNFKSPNLREIAKYGGYSTYSSNSNTDPWIRETLKIHDRETYEDIWGYTRRPQGTPGMYTALGKFAGEKNVFGSLSPNQQSSMRRAIGKAKKAFKLPYKREPLDWHEVGQFLRRDTSAGSTFMGSKKGDVMEEIYHEARWLGHRMKQDGKESFDPTRMRFPPCLAGQRGGMSERDDPKTRLVWIYPAEMLVVEGFYAPLMYRDFMNDPKSPMLNGKSAQRLYTEWCCNLRTGETLYGIDFSAFDTKVPAWLIRAAFQILRQNVNFETFQGKPVEKVEAQKWRNVWDAMVWYFINTPILMPDGRMFRKFRGVPSGSWWTQMIDSVVNYILIEYLADCQEVEIRNLRVLGDDSAFRSGDQFDLERAKIDCLPTGMVIKPEKCERTKDPSDFKLLGTKYHDLHPFRETNEWFKLALYPESSVRSLDVSFTRLIGLWLGGAMWDRKFCEFMDFFQTSYPCPEEGWFSKDQKRWLEIIYSGKAPRGWTTKKSLFWRSIFYTYG

SEQ ID NO: 1200 - protein, 584 aa, Sophora japonica powdery mildew-associated partitivirus
MASTNLLRLGKIPRSKKHNDPLSRSLRINRIRQGIIKRAIYKICPINLARQVIFGFKRSEGSDDVAETDFLRSDVPYFDMKRDFHYLRALRVCERLFRPSRTLHPIAFPDLRFYPWSLSVSAEAPFSVEKKRSTLIRSRQSDGEDLDGRLTFHNLYNEIFELNRNLIHQIKEGDKSFWNKDGTPRPYWYNTLHTRPHLVKSSEPDKLRAVFGVPKLLLMAENMFIWSLQKEYLNQKIQSPMLWGFETFKGGWLKIWNRMYSKKCSTFLSADWSGFDRFALFECVDDIHRMWRNWFDFSKYEPTIAESGPPGIQLSYPKSKTNPQKIERLWNWMCYCSKYTPIKGQSGQLYQWQYNGIASGYQQTQLIGSFVNSIYMLTCLSDLGINIESDNFQLFVQGDDSLTEFSEIIQKDDLPKFLTNLAKVAKSRFNANLSVQKTTAGESLNDVEVLSYNNTYGIAFRDEAELLAHLLYPERFQTLEATVSCCIGIAYASMGCSQYVDDTCLDAYNFLTTQFKVKPDSNFLQDFFRIRGSPLTDDFHNPRFPTKDECFNQNYEVRSRSDSEKQRLWPSIPTGDYGFHFINE

SEQ ID NO: 1201 - protein, 533 aa, Soufli partiti-like virus
TCRHMSKNRKQAFARLPDAAGFPFSLLPARKDEWAEEVCSRHFGERPIAKVLNELHRSTITYDAMLEDLKGYDVEPARCVRDDAYYAVLNSIRQDFSRFPVIIPLTMGAVPQRPDFPGQKSPGLPYKLQNFATKAEVIEAGKLHEINRDWQNIGFKKCRVELPDVCLFARAQIARQGREKIRATWGYPISVYLEEGRFFYPIQDAIKARHHEFPIAYGYEMANGGMQVLNGLLGRNPGSKYLCLDWRQFDKTVPPWIIRDVFSLLAEKIDWSHVEDVEGKIWPVNPEPSRRRWKRMVDYFINTPIRTCKGERFLVSTGVPSGSCWTNLVDSLVNALYVRYAVFQTTSSFPRDELYLGDDGVVIVQGTINLQDMAQVCLERFGAVLNIEKSYVTTRTDNVHFLGYFNKAGYPFKNQDFLVASFIQPEHTRKDALDACAAGLGQLWSGFDPSYADTWRKVILDVAAKDGLTQDQVVTHLRSTAHRHKYLMHVGLDARTLTIPAPNEYGLILDVLPKSYTGRLPPRRVYSLVELFS

SEQ ID NO: 1202 - protein, 605 aa, Soybean leaf-associated partitivirus 1
GLVNTTRCYRTIHFYFLASQTKANCRSAPELVFTHTTTMEKVDSPIESLDTNFFLERTSKFRPHVPSIDPFATAKHQKTIRKALERYCYPQQIEKIIHGHIRHEVTEELVLHDFFAGNVPDHPVPKDQHYENGLKLTADLFRPPHPCRPVHLLDIQHHYPMKNKPNAEAPFSTEKKYLDMIPPDTKASTGNMKPIIFDYTRRWHHEIKNGTEPEHRHLYYMLLHVKTALTTTASPAKARSIYGTPKPFILAQIMFHWALFAHYKSVKGSSPLLWGYETFNGGWMRLNYELMHQYLRTSILMIDWKRFDKHALFTIMRDIFKVQRTYLDFSRGYIPTEDYPDTASDWTPEKAQRLERLYEWTNYAFENTPVLLPNGEVYSRRHAGIPSGLYCTQYDDTMYNCVMLLTILYSLEIPLSKDMVIKLMGDDSLIRLLIVIPPNQHDDFLLKMQDKADYYFKSIISVDKSKISNRPNGAEVLSYTNHNGLPHRDPDTLLAQLYHTKARKPTPGKTMAQAVGIAYASCGFDKQLYRVCKDVYGYYHSQGHTPDKTGLALALGDDPFGLDPNEIVVDRFPSYHEIQANLTTLDYVSSSVERFWPQGHFLCDY

SEQ ID NO: 1203 - protein, 602 aa, Soybean leaf-associated partitivirus 2
NQNGTETKSKSNNKQHTHNTMHATNLQVVGHLPKNTKVFAFHQTRQDALRNMSEKLVKKAIHMECTPELAQQAIHGYRRSKGGDAIAEEDFKKSDQPYHPVPRDFHYRKALATCERLFRPSRRLKPIAFPDLRYFPWTLNVSAEAPYSYSQYWARELRRMQAEGITLDSKPTFHNLYDTIFHVNRSHIHSIKFGLYPFWDQETGEPIPYKWNTLHARSHTVKADKDDKIRAVFGVPKLLLMAENMFVWNLQKEYLNKRVKSPMLWGYETFKGGWQKLWRDLFKTNFSSVLSADWSGFDHNALHEVIDDVHRMWRSWFDFDQGYEPSKSDTHDYHASQTEEWKIQNLWDWMTHSVKQTPILGFSGTIYKWSFNGIASGFQQTQLLDSFVNAIYLLTCLSAQGIDINAPGFNLFVQGDDSLTTFQERVFQFGGKTFLQKLAKEAKIRFNAILSVDKTSHGTSLNDVEVLSYRNNQGIATREPAELLSKLLYPERAKRLGGTAASAIGIAMAAMGSSRQVYNTCKNVYDFIVNELHVEVDFKEFRAYAATHRSAAEEALSLQPTYFPTFEETLGYNFDYSVRTESEKQRLWPTKPTGNGFHFLVD

SEQ ID NO: 1204 - protein, 601 aa, Soybean thrips partiti-like virus 1
MLEETTLEDQYVEIRDFIEEKSLSDLERWRIINQHDLRDEDGNIDEELYAYYYKLEAQEPKIISYVNIQSFINDVKAIMESYRLRDIKRGEPFEFYRPMIQKDRMPNRINVEPGIRLLHYRYHTNQPIYATPDLPESGFKPAKAICKIVNQFFPQYQVYLDKYCRPLGTTESTFIDFNKEQKCTKALNEDHTQHVLVLLKKFLNCKPYLPVYYEGTQYAKLPLSTGTGYYDRSNYRTRALAKLSHSKVYEHKPTCKGYYLNATYKEHQRLIHNIKHYRCPYLLKDRSEENRNRIVAMMFAQRATMLFTRNHISVPPTLKVRPVYNTDPLFNKLEVMLTLPLIVQMRPIESCLMYSLETIRGGCHKLDSLAQQYDSYFTIDWSSYDQRLPRHITNVYYHQFLESLIIVNKGYAPSIDFNEPFNPEQTQFMFKKVSNALEFLHEWYNSMVFVTADGYAYQRTQAGVPSGLFNTQMLDSFANLFLILDGMINYGFSDEDILDMRLFIMGDDNTGFTRLPLLKLEKFISWFESYALERWNMKLSTSKSIITNLRQNIEILGYKCNFGFAKRDIGKLVAQLAYPEHGVKPKYMSYRAIGIAYASAG

SEQ ID NO: 1205 - protein, 569 aa, Soybean thrips partiti-like virus 10
MDTIRGHKLNFTYELGIARTENVQHGRKHAIRNPTFPGRPAHSSDLDHRLARSTGSELEPRSGFGFNMEPPYPSFKTLRAAYNAGLGGIAERVISTKKRSWITNDAIWDGVLKFSYPTTKTHDCTVYRTVLRQLRREFKVDQKVPLTDINISRSRMPQSTSPGLPYIQQQDCKTKGDVLERDFEKFVQKWDRVGKGYNVDFPACAAFARSHIGNLDVNKVRPVWAVPVEIILQEGVFAYPIIDELTSQRIGEHTAYGMEMMKGGMQWLNEQALQYRMKYPGAQFILTDYSAFDSSIPAWLIRDCFRIIEEKIDFSRKQTSNGIVDCNANQEKRKFKKVVSYFINTIITCPDGRTFKKDHGVPSGSMFTNIIDTMVNFIVTRVAVRYKCGVYPTFDLYFGDDSLVAVPSNILINLDDISDFVRRIFGMVINPNKSYYTDNVKNIHFLGYYNQSGTPKKTDLDLFASMLYPQYNKDEWSYSLSRALGCLLASAGANPDIFHIARNLYHMALNSKPGETEVDNAIAMIRTNPRMKRHLETMGCGDIPLTRDFFSDYKMSVPAANCTKLMKNI

SEQ ID NO: 1206 - protein, 537 aa, Soybean thrips partiti-like virus 11
RTLMLKMGLASMTNSLKLTTPALKSLLPGAGFTFNYRPSRLDRNALYALNRVLDPGKTAEVRTKYHRAHLNLDDLRADLLEFGAPKAKRHHTNAYYAILESVDKSLFPDSNAKIIPWTHGSVVAYPDFPKNKSPGIPLKQQGYNTKGEAIDDPKVMSGIRKMWYAIARGEKVQLPDVACYARAQICERCKNKIRATWGYPLAVLLTEDQYFYPLLEHVKTNGSRLTAYGMEMGNGGMQFINEMVKAHPGANILMGDWRRFDKTIPPWLIRDAFKILERHIDFTHVRTVATNSIWPVKEQASRSRWKAMIDYFINTPIQLSSGERFLKVGGVPSGTGFTNLIDSIINAIVMRYLTYELTGALPLDDIYLGDDSIIVTDKPFNLELLEKVAFDQFTMVFNCDKSYQTSLRRNVFFLGYFNDNGEPYKPIDTIVASAIYPERPVENKFETVTRLVGQAYACFRPDDAKKFFMAAKILSDEIEGLEPDFVERYIVEHPHQFKYLDTLGIKVDKGVKFPQVQPGDDLWVTTPHAPKRHYKPD

SEQ ID NO: 1207 - protein, 483 aa, Soybean thrips partiti-like virus 2
MVRFIGRDKGFSQWHFDSTESFYCPLEAQQKTKGLVRSRVTLSSIRSDVLSFGSLTSARQPDDPLFRQVVREAATVWSLTEQVQPIHLNDLPRYKLDTDTSSPGLPWRNIGYRTKRQVLDDSEAFKSIRSFWHVIKYGKRKQHPPDCAAFLRAHLVQEGECKVRAVWGYPATIGFQEACFALPLIEGFTNGKFPIAYGYETARGGHLRLLSEYGPKGHFLSSDYRSFDKTIPSWLIRIAFNILALSIDFTKYRDYGIPDADALFKAWKYLVHYFIYTPIRLANGERYRKSGGVASGSYFTQLVDSIVNWIVTVYALRKSGNVVEIIKVLGDDSLVRLQKPLDMEKFEKYSSELGMIINTAKSQTATSLEFIKFLGYYISNGIPKKPVEEFWAALRFPEYPDASFDHYATRAMGLLISTFGQHDEFYDIVSSQLSLGFTVRMSPSLRRYCAALGIESLPEKPPPIIELGFPAFRDRKVRSRSTG

SEQ ID NO: 1208 - protein, 259 aa, Soybean thrips partiti-like virus 3
PQYQKHIDTYCRPLGTTDATFKDFNREQRPSKPPTQVEIDTIIPVVIDILGAKPFRPVHFTDTPNAKLPLSTGTGYHNRSSYTYNIHAKYAAPPRYKNKPTSKGRFFPTVFPIYRLIIHNMKYHGTPLSCKQTTPLDARQRELARFIINHPTIMFTRNHISKKAGPWKQRPVYAVDDCFLYIEVMLFLPLICQARKLTSCIMYSLETIRGGCHYLDSVAKSYQSYFTIDWSSFDQRLPRVITDMYFQYFLPSLIIINKG

SEQ ID NO: 1209 - protein, 472 aa, Soybean thrips partiti-like virus 4
MPLTRLPSGKGFSQRHKTHSYPSPYLIQFFNEIPSKHRSPVTFDLIRKDLLQNSNDSKIPKSLTMKLAILEATKAFQLSSPVKMMHLNDVFKQDLNIWTSSPGLPWRDMGYKTKGDIRKDVDAVNRVRWFWHKVKGGSNIDAPDCCAFVRSHLADYGETKVRAVWGYPATMTFGEAVFAIPLQRAYEKGKYPIAYGYETAVGGTNRLVRECSRFKYKYALDFKSFDKTVPVELIDAAFNILLLNIDFMHYEDYGTADVLKNFRMFEYIKDYFINTPIRLCNGERYRKSSGVASGSYFTQLIDSIVNYILIVYLCLELNGKLPDYIKVLGDDSIFCTDKLFDLDRADELLQKFGMSLNLKKSAVSRSLNKLTFLGYQINDGIPSKPYDLWLSALLYPEEADRCWDDVASRSLGLLYACMGTDDRFDGYCRAILSLKPYSLDTSKGIFRMLRNVGIKDVSTTPPSKWGFLKRII

SEQ ID NO: 1210 - protein, 445 aa, Soybean thrips partiti-like virus 5
MPASGAAHHAPFATDWVRVYPRPHNVTAKVMTYFRQYAKRLTGERYARALRKAGEDYRAPPIRPYHIDDVISHFQHPHTSPGLPWTTLGFRRKDEVPLSSVKAAIRMYRQGIWNKCTSPCNAVCRSMVAKTPKHRLIWVYPMHMVLAEGMFAQPLISYHTHKRGTYGQWIQFSKGHLRSLMSRKPRKMQWLGIDYSAYDSTVPPWLIRDAFSILEASIDFNSYAGYGHPKKPDELRRLWRVIVNYFINTPVKLPSGVVLRKSGGVPSGSYFTSLVNSVCNSIIKHYILDEVEYSRDANWELGDDCLVAVADTFTMEGLDTVANKAFGVNVNEDKSECGQYVSFLGYRMSPSGIPMANYQKLMAQLCLPERPDKCLEETVSRVRALQLSCFGRGCLPFVFETQAWLESQGMSDYTPRLHKRSELYIKLSALDLASFPPLTKVMMMV

SEQ ID NO: 1211 - protein, 434 aa, Soybean thrips partiti-like virus 6
TCSSKFRVQYRVNSRINDVFINLTTDPRLCSPTEQRCLRRNTTRYVRLMKARHIDPFSEDSFDLSWYESSFHKTIGWLKNKLCLRVDALPVYHPNDVADYLLDRQRNNDLSSSPGRYFKRLGFKSKREVYESKKGMFYVKSFIHKVKRKNVKFAPAWVACPSAIIRDGKIKYRNCIVFPADVSLLEGMFAVPFLSRLPPTWINRAERDCKRLCRLGSFKVDFSRQDTTVPKQMVFAGMQVIKHLLDFSRYENRGSPNRKFSLEDCFDRLVNYHVKTPCYVHNGKITFIQDGNKSGSMFTNLLSSVISYLSCMYSFAPYDLDCYGDDTFLVQPTHNKKMTWMDLKFEQPNEAGHLTYQKCVCVGGRGYYPGVWFRNIMNKALWYHRPSIAWCLLHSVRWLTPEQETYLKSFLGRDIMYGSKWLTRYLLRIVEFIL

SEQ ID NO: 1212 - protein, 441 aa, Soybean thrips partiti-like virus 7
MMRSIKHPFVTSWIRYNPRPLDVAAKVDAYFRKYPSKPNDDRYLRALHLARVDYSGPKVYPFHINDSIANFQHTNTSPGCPYRQTGYRRKDEVPAIMIKNAVRRYKEGEWTKCIHPCIAVCKSMVAKVPKCRLVWVYPADMTFAEGMFAQPLIHQLMGERSHYAQWVQYSKGHMSYLQGQLPNSWKWLGLDYSSYDSTVPPWLIRDAFDILCERIDFTRYHGNGIPEPNNLRRLWRVIIKYFIETPIKLPSGKVVVKKGGVPSGSYFTSLVNSVCNCIIMHYLLDGKAYSRSASWQLGDDMLVAVGEAIHMEGIAKVALKVFGVIVNADKSEYGSYVSFLGYRMSPKGKPVANYEKLVAQLCLPDRPDYTIGDFVARARALQLSCFGHGSWQFVCETEAFIVSVGAQDWIPKLRKRSELRSKLEALDLAHYPPLTRVMMQV

SEQ ID NO: 1213 - protein, 697 aa, Soybean thrips partiti-like virus 8
MALNPVRNYLHEQRIRQKFELRLHSIYESKDEELPDFDELENVRMIYSSGRDRPKEKSLQSILQGLHDKMINTLKDRDTNRGEAFEFYRQIHYTLPEEWQPSEGILTLPIVYHRSRVIETTDIVGETGYDLHPFIKYLIRHKYPHLEHIVKAYCRPLGTTKATFDDFNKAQYPVEPISEHRQERVIKHVMRCLDVRPTLPLHYVDTFHIGLPLNTGTGYHNRHSYLTQIHAKYFSHPKEYAYKPTSRGYYINAFSEKARYLIHLIKYNGFPGNYENTYTQEQIDEILDKFYARYPTMLFTRSHISKLLDKLKQRPVYAVDDLFIRIEAMLTFPFHVQARNMKCSIMYGLETFRGGCAYLDKIAQQYKSYFSLDWSSFDQLMPWAIVDTFFNKFLPKLIIVNKGYQPTFEYPNTSYSQTDAMAGKTHNLLAFLREWFYGMVFMSATGYAYKRTCAGIPSGLLNTQYLDSYCNLFIMIDALIEFGCTDAEITQIRLFVMGDDNVGFTNWSLPRLESFVDFLEDYALKRYHMILSRKKSIVTEQRQEIQVLSYTLNFGLPKRSSDKLIAQLCYPERGVVDKWMSYRAIGIAYASCGYDLQVYKFAKDVFLMFLPYAKILSPEEDELLAPYLPGQFRILNEVPDYLKKLEFPTIADIQKECLNWQGPLPTHPKCNEGHFLYKADHEYSDYITLEKWYKNQK

SEQ ID NO: 1214 - protein, 527 aa, Soybean thrips partiti-like virus 9
MAHTNVTKLSKGQGFPMLLKAARPDSIAREACNKYFGEDKVTQITNCLHRSALNYEAIVEDLMKYERKHVRRMTGDACAIYEMVLQSVRQDLKKEDKIIPLTFDEVGKLPDFPGAKSPGLPHKLMNFRTKREVFEDEEQMAILKDMWYAVENKKVVHFPDVCLFARAQIAKVPKQKIRATWGYPFFVYMEEARFFYPLQDYIKSQKHNFPIAYGFEMANGGMSAINDMLLETKSSQYIVSDWQSFDKTIPPWLIRDAFAILAELIDFSSVGRESHNRRRWKAMVDYFVETPIRTCKGERFLVTGGVPSGSCFTNIIDSIINVIVTRFLVYQTTGKFPTGEIFLGDDGVFTLDGFANLEDWASLALQYFGMVLNVSKSYVTSRLDNVHFLGYFNINGQPFKNQDFLIASFIFPEHRRETKVDACAAALGQMYSGFDPLYAVRWLKIIRFIADSEGGHSNEDILLKLRHQAYRHKYLQQVGIDTATMTIPHDSGFVMEVLPKMSCVHRLRVRNYDPDELAALADLRLRS

SEQ ID NO: 1215 - protein, 616 aa, Spinach cryptic virus 1; identical to SEQ ID NO: 603

SEQ ID NO: 1216 - protein, 713 aa, Steinernema ceratophorum partiti-like virus 1
MLPLRDFHFERELRSNLEMRLYQIYKGDKEALTLAHNHISIRALYSSFKTERCLDITTKARQSIYERTRNQISDEVSTSNERFQFYRYNPRLVPPPNREPAPGITFIKSNFHTGRTTTASDQLPESGYHCPRRISNLMTWKYPQYLSIIRQYVRPIGTTDATFADYNREQVYCPRNDAALNDRIVKLISEYLDIKPYRPLHFIDTFRDDRPLSTGTAYHNRYSYTIKAHAKFCHPAIYAYKPTSKGYYTNAYSQYARRVIHNIKYTGLPFSEKETAQLKTVDHTISHLNRFMNSHPTRLYTRNHISPVKGPWKQRPVYAVDDKFLTIESMLAFPALVQSRKPTCAIMHGLETLRGGNVRLEEIACKGDYESFFTLDWSQFDQRLPHAITDTFFEDYLPSLIIVNHAYQPTYEYPAYPELSTESTATKIKNLLDFLQYWFNNMVYVTSDGYGYKRQFAGVPSGMFLTQFIDSYGNLYLIIDALIAFGCSDDEIRTIRLFIMGDDNSGFTHWPITKLAQFVDFFESYALKRWNMKLSASKSKISILRTEIETLSYRNQFGLPRRPIDKLLAQLCYPEYGPKPEYMSARAIGIAYAACGQDDTFHSFCRDVYNLYLDESVDVTDPTKRSNIIRHLPGIFRAFPEQSEILEFTRFPEISEIQQLVSYYHGELDVTPKWNLSHFTDRPDIPLENARTLKDFESENGPILTRLNELKKS

SEQ ID NO: 1217 - protein, 586 aa, String-of-pearls partitivirus
MQNTVVIGYKPKLAKALHGNPDPGSNPAYRDTVDHALRRFLTAEEFDIVTKGYRRSPWNDEALKEDIAKLDSIEHPVIKDKHYYRALSHAYRLFSPKNKMKPVHFADLRHYPWQLSSNIGAPFATSKEWQKYVNEKFDLGGQSPKVRDLFKEAHHQALYPSMIDRRMTKRNLYNEMFLINRKNIHLIKDGRKTTDSGHDLRYWNTAFARQHLVEEDDPDKVRLVFGAPSTLLMAELMFIWPLQVSLLARGPESPMLWGYETLTGGWSRLYTWANKVQPRYGSVVTLDWSRFDKDARHTVIRDIHRMVMRPMFDFNNGYHPTIYYPETPDTNPHRLENLWNWMTDAVLTTPLMLPDGTILQFTHSGIYSGFFQTQILDSIYNCVMIFTILSRMGFDIEKISIKVQGDDSIFLMPYSYITIKDTFLNFFSQYANVYFGSTVNIKKSEVRETLEGAEVLRYRNHGTMPERDELQLLAMLRHPERTASLESLMARTIGVAYANCGNYTRVYNICEDIYNFLAKGGFKPDPFGLPGGLRYKQNYIPSYVEIDLTRFPTYFDTVRSLQDPQREILTQHHWPELHFIGIPGKS

SEQ ID NO: 1218 - protein, 545 aa, Talaromyces marneffei partitivirus-1
MSEARVPEISPSDPPSVDEIIEESHSVDDSTLVPSLRTRGASYDVIPQNFSSPGLREIARYGGYSVYSARSNTDAWVRTTLKEFDRQVYDDIYGYTRKPEGPVGMYKSLLKFSEGRNSFHHLTRVQRRAMQQAIMRARKAFKLPYKREPLDWHKVGQYLRRDTAAGVSFMGQRKGEVLEEIYHEARYLGHRMKGRKGRRFNPKEVRFPPCLAGQRGGMSEATDPKTRLVWVYPAEMLVVEGQYAPRMYHDFMAQPDTPMLNGRSAQKLYTEWCTGLREGETLYGLDFSSFDTKVPAWLIHVAFDILKQNVDFETWGGKPVSKADRQKWSNVWNGMVWYFINTPILMPDGRMFRKYRGVPSGSWWTQMVDSVVNYILVDYLATCQEVDARGLVVLGDDSAFHSTPDFDLIKASEDAEAVSMVLHPEKCDRTDDPGKFKLLGTTYRNSRPHRDTNEWFKLALYPESSVSSLPVSLSRLIGLWIGGAMFDDKFCRFMEYFQTCFECPSEGWFKKDQRRWLEVVYGGKAPRGWANNKSLFWRSIFYAYG

SEQ ID NO: 1219 - protein, 721 aa, Terfezia claveryi partitivirus 1
MNFTVIYASILHYINMVIFAQRYLEPDETKSRYTYVTERTIPHNREPSPGLNLLEHLEYQPFGDFQYKDQDPAGPPPLSGIARIIRQNFPQFAPALSEYCRPTSSPDSAFSDFNKPQSPIPALDSTVTEIVLELLDHFFDMQPYNTIHWADTRFADLPLSTAADYYHRTSTFRTAHAATSHPIWSAGPTKKSWYINVHLEKDRTVAHNFKTFRYPFNPNTSKFDKQSGIQSFYFSHPTMIHTRSHLSKRTGPFKVRPVYNVPMLYLRMETMLFYPILCHLLKGTSCMLYGYETIRGGLHRINQIAYSFNSYLMFDWSSFDQTVPFPVIAIFFLQFIPKYILVNTFYADISNYPYSKNFDSFFHRAQALQQKGLFQDIPTDELAYLLFAQQIYNLLISLWTWYQNMVLLNGDGFAYLRSCAGILSGFLLTQFLDSFCNLFVMIYSMLNFGFTPDEIKQMRFFILGDDNVIFTLESLNRMLSFFLWIPDYAEKTFHMKISIKKSLITSIRSKIEVLSYRSAEGLPRRDVMKLVGQFAYPERHTDEFINIHRCIGFAYANCAQDLAFHELCRQCFLYYRTKAIQLRIDNPVRYEKHTRSIIRNIYVQMLATKSTIHTKSILKNEALPGPIQALLSLDAPIPNLEHFPSFTEVQTYVSRWHGPLSTDTKWNRKYFLNPPTRTKSTKNVTLFDVLQKYPHQFESNTFLSHPLMHSESTIRPKDEPL

SEQ ID NO: 1220 - protein, 483 aa, Thedrake partiti-like virus
MTMLQRRPFRAEYLVQWNARKSNDETEPLIDKVVVAVLHQQGIPFEYSGDYRNIYSYDKLMEQLEHYDRKFTLNKDNPYLKFGLSVAFKLFACPDTKMRLETVELVSGATELIETLNIKEDRSAGLTAYGESKATAFTVGLDKAIDILQNGKSPAPCLAGVRTQRGEKTRLVWGYPLEMTIIESVVARPLINYFREADTVMSFGMYSHETGARMRTSASQTKYHYSLDYSQFDAHIGPQFIQYAFDAFRTWFNLDDKVCGDVTLRELFDQIQKYFATTPIVMPKRGAKYPEVVVGKRGGVPSGSYFTQLVDSFVNTALIFACSARFQLGLRDENVFVLGDDCLFFCNKDGSPELLSKMSQFLCTLGFKVNAEKGSCGLSTDEIEYLGRRWKNGFPVRSMKEVTRGSLYPENYRKYSPERGIRQKQVLSVLNSYLLTSYLEDPPVGVDVFQQVYEITPWMSSGFTEFLLREGLIPGDSLRRAIY

SEQ ID NO: 1221 - protein, 533 aa, Thelebolus microsporus partitivirus 1
MRDVTFDTLLSPDDELLTGNEFLADSNLVRRPERKEELLSLPGLKEIALYGGYSVYSPPGNTDPYVRETLKLFDRQMYEDIWGFTRRPSGLEGMYTALHKFGESKVQFNDMSTYQRSVMKLAIGKARQAFALPVKHEPLEWHEVGQHMKHDTSAGVTFPGKKKGDVLPQIYTEGRWLGHRMKEGGKGRFDPTKVRFPPCLATQRGSLSDRDAPKTRLAWIYPAEMLMVEGLTAPVMYRQYMSLPDGPMLVGKSSQRLYSEWASKCKEGEKLYGCDFSAFDTRVPTWMIKVAFDILHNNVDWLNWRGKPTTKRARQKWRNVWDGMVWYFINTPILMPDGRMFRKLRGVPSGSWFTQLVDSVVNYIMIEYLAGCQQVQVRNLKVLGDDSAFRSGHEFCLLRAAEDALSVGMVLNSDKSERTECPTEFKLLGTTYRNGHAHRPTEEWFKLALYPENPVHDIGVSLSRLVGLWLGGAMWDSHFSRFMQYFQSCYQCPDSGWFSKDQRRWLEIVHSGKAPRGWTAKKSLFWRSIFYTL

SEQ ID NO: 1222 - protein, 232 aa, Thin paspalum cryptic virus
HLKDVQSSYPYKWNVNAEPPFSTDEFFLSQRKTFGEFIQQHEYEHIDKYDFFRRHPNTESHDLIRTVVPPKFGYMKSTIFSWTHRWHHVIKSDFRDSTGLHTTGYFYNRFIFPMLLHTKTAIVKKDDPNKMRTIWGASKPWIIAETMIYWEYIAWIKLNPGVTPMLWGFETFTGGWIRLNHVLFCGLLKRSYLTLDWSRFDKRAYFPLLYRIMQATRSFFNFNEGYVPTHPS

SEQ ID NO: 1223 - protein, 488 aa, Tomato associated partiti-like virus 1
MELYNGHVSYNGTFEYKGKLTGFGMRPTGDTLSPYAVICFGEQDGLHQRSRLSSRLIFHDVKEMGKNKTPIDFTQEAFAYARWKTFNAFQFPHRINPIHLNDIFDMDLPCRKSSPGIPWQPYFKTRGQVMDCYAARNSIRWLWHRVKKGEDVCMPDTKVLYRSHISEAGKPKIRAVYGYPTTVTLAEAQFAVPLIAQFKKLELPYCYKYSMGLGGANKLRTDIKRYKFFTCLDFKGFDKCATNELIEMAFDVLLQNLDFSRYHASGVPDSTRLFREWRKIIEYFKRTPLRFFNGHRVQKDGGIPSGSYFTQMIGSIINYFIITFMYYRQLGRGPDFLTVFGDDSVAADDEKICFGKAIHDVYTYLGYVFNIDKSKFTDRVDDVEYLGFGISGGFPRRPFKKWLESLYYPEHPDMSWDDFASRALGLLYANSGVDQTFDLMCRTVLYHKPFRIKLTRDFQRFLENIGVTIEGMQVTPPSAMDLLFSLLK

SEQ ID NO: 1224 - protein, 614 aa, Trichoderma atroviride partitivirus 1
MKTNLLFLYALPESQLAKVNKWKIASEAMTARNEWLERQMRKFYTEDEVKQVLTNRRSADSDTALIEDFMRCEFPEHIIPEDHNFTKAIEIVTEHFRPERKLHPVHFPDLRYYPAELSVSAERPFTDPSFRFKPMNRDIDWETGVPKVTKVDHHDELQNWDKHTDVLTYLKWKQSKGLIDDEKSSYHNLYNEIFTYNRPLIHQIKEGDEPFWKDGTPIPYQALTLHMRSHVVAADEPDKIRAVFGAPKLLLHAELHFIWPLQASYLNGKCGRMLWGREMNRAGWRKLFQEIHQNGKPNTIVGVDWSQFDKRLLHALIRWVHKIWRTYFDFSKYEETSTYPNATPGNSDRLERLWQWMCNAITNTPIILPNGQVWKWNWNGFGSGFQQTQLMDTFANAIMIYTCLLALGVNLLAKEFWARFQGDDSIMSFFERMFQIYGPGFLVMLEKSAEFYFNAKMNVKKSKIQEHASQMFVLGYFNSNGLAYRTDEDLLRHLMFPERPQDFGRLAASAVGLASASLGCSPRFYMFCRYIWNKLVHQKMVKPKWKALKWMIRARMYENIDQLKAMDFPPYDELLSRRFAMTNRTESEKQRQWPTTPKSSTSAFYFLNDVTTSV

SEQ ID NO: 1225 - protein, 727 aa, Trichoderma citrinoviride partitivirus 1
MRFPDFRDILSEARSRIQKFNQWYHNTNDAEQHSTISPLPLGQHDHLEPDAQKLRTYFERLRFTHLGNQPEPTAEELHNLDQTYQHYVQRHENWNEPFELYRSLQDSELPPNRYPSPGLTVLPLRYHSGIIVEPTHEVPVTGFEPHPLIQYLVDRKYQEYKTYLRSYCRPLDTTQATFEDFNKEQIPVLPLTEEQIARTLPLVTHFLNAQPYLPLHFVDTRRMKTPLSTGTGYFQRFSYTFLTHAAYAHSKLYQRRPTSKGYFFNTIYQYGRTWLHYIKRFSNPFHVNINTDPSGYYSSLKRFFQEHATMLFTRIHISDRDGNLKVRPVYAVDDFFILLEGMCTFPLHAMARIPINGIKSSIMYSYETIRGGCAQLDWIAQSFSSFLCIDWSSYDQRLPRCITDLFWTRFLRSLIVISHGYQPTFEYPTYPDLDEHALYTYFDNILHFLHTWYNNMVFVTADGFSYIRNYCGVPSGLLNTQYLDSFGNLFILIDSLFEFGCNKTEIMEIVFFVMGDDNVLFTHWNEDRLYAFLVFIENYALTRYNMILSKKKSLLTVLRSRIEILSYQLQNGMPTRPIGKLVAQLAYPEHGPKDKYMSARAIGLAYAACGQDPTFHEFCFDVYHMFLPFAAPMDQESIQVASAYMPGYFKQFERIAEFIDFTRFPTIDHIRNKIRKWQGFLSLDTKWDPNWFVNPPYAVPLDAKTMTDYQVEHSLLTRETPFLFQQV

SEQ ID NO: 1226 - protein, 722 aa, Trichoderma harzianum partitivirus 1
MSTNPPIITELPRSVDPNATNVRYAQLLETYRTDPSNTNQRNLLEYAEHHGFNYFIPTDVPLPDDRKANTGIAALHGFRFHTVAAFHRYQNMSRYGYDALGFIYRTIVTLFCNFVWMLNDYCRPSGSADAVFENFNQATTPVDPIEPSRLGQIMPLMHHFFKIKPYCPIAFPDLRFYKWSLVTSADYHAHHSKDQQDDSARYWKHLKDNDLLDNRYDYSDRPRSKGYFFNTVLLSTRTIVHNIKYFRLPFQRHSRDTLESITSKLSFWFMKYPTVMYVRSQISKLTKLKVRPVYNAPFLFILIEAMLTLPLMAQCRLEDSCLLWGYETIRGGMQELNRIAHGYDTFIMIDWSRYDQLLPFAIIYHFWCTFLPQLIRVDLGYMPTKQYPAKTHTKAFTEKHHNHLKSNPEYVNFASRLPFYAPHIIMFSFIIFNLISFIWLWYVRMVFVTPDGYGYVRLLAGVPSGIFMTQICDSFCNAFLIVDAMLEFGFTTEEIKLIKMLIQGDDNVIFYLGDFSRIFAFYEWMPQYCLTRWHMIVSVDKSKITRLRNRIEVLGYTNLNGMPHRDAAKLVATLAYPERYVQDKTKYVIFMSRAIGIAYANAGHDREVHDLCERAYKQARKDSGLSVDELKQVPIEYQKLGFYEIFSVNIEELRTHLIQDVSQFPDFYDIRTNLRYWHGPHSVYPMWPSHFDDDLATIKSPKTLTTLYDVMQSAGLEIPTNY

SEQ ID NO: 1227 - protein, 524 aa, Trichoderma harzianum partitivirus 2
MEYNHELPDDDSIGEDSPMIWDIPFRYLTDVKRFPDFKRGILRQTQRYDPYVDVALKSFDPDLHERCKGYTRAPGGQYELWEKLRKYDVASSPIILGNNRFSAAYKHAVDTVMSELKLDAPVVPHWILDVDLVTSTSSGYPHFKRKGDIIDQIRQEGRFQMHHMKLYDLHRCPLLPCTIGARGGLSDVSDPKTRLVWMYPAAMTAVEAVFAQPLIDKMYTEKGDFFLTGVDSKHRIQKYLSLLDGEEGTAGVGLDFKSFDTLRCPRLIRDAFAVLKQNIKFGYYYDRITGLQKGRSGVDSRAEKCFENVVEYFIHTPMLLPNGRCISKHHGVPSGSHFTNIIDSIINRILIKTFLYYQDLRFKNLRTNGDDSAFSIPLEECDGILDKALKFFDYFFKMTVSVAKSCVASSPSEMHVSGTTWSALRPTRSTDEWFMLAAYSDSYVRDPFDSFQRLLGLGIAGGFTDSKFVRFFGYFQSGYDCKHGPNLLNWKKLRWLEHAFNITDLPLVYKQGARSTMRLRLLCF

SEQ ID NO: 1228 - protein, 539 aa, Trichoderma harzianum partitivirus 3
MDDFTLDPTTHLIFNEGSHLIDELHLRPAKAGQANSEDVVPSNFNSPNLREIAKYGGYSTYSSNSNTDPYVRETLKLYSRDIYEEIRGFTRRPQGTPGMYTALNKFSGEKNNFDDLSVSQQSSMRRAIAKAKKAFKLPYKREPLDWHEVGQFLRRDTSAGATFMGAKKGDVMEEIYHEARWLGHRMKQDGKESFDPTRMRFPPCLAGQRGGMSTIDDPKTRLVWIYPAEMLVVEGFYAPLMYRDYMSDPNSPMLNGKSAQRLYTEWCCKLREGETLYGIDFSSFDTKVPAWLIRVAFDIVRQNIEFSTFQGKPVGKEDAQKWKNVWDAMVWYFINTPILMPDGRMFRKYRGVPSGSWWTQIIDSIVNHILIDYLADCQDVEIRNLRVLGDDSAFRSGDQFDLEVAKQDCVPTGMIIKPEKCEKSKDPNDFKLLGTKYRNGHAHRDTVEWFQLALYPESSVFNLDTSFTRLIGLWLGGAMWDRVFCEFMEFYQSSYSCPEEGWFSKDQKRWLEIIYSGKAPRGWTTKKSLFWRSIFYTYG

SEQ ID NO: 1229 - protein, 160 aa, Trichoderma reesei partitivirus
AKFSHPVEYKHRPTSKGYFYNAFWEVARTQLHKIKQSNYPLPVPFDYDPDPELSDEERFNELAKSLSIYIDNHATMLFTRNHISERDGNLKQRPVYAVDEMFILIEAMLTFPLLVSARHPDSCIMYGLETIRGAMSYIDHIAKQYSSFFTIDWSQFDQRA

SEQ ID NO: 1230 - protein, 712 aa, Tuatara cloaca-associated partitivirus-1
MSSNLLRDYYNEKLLHLQRDLQLFQLTGKDPRATLELHNDSDLDRTERTFKLSSAFFSATDLYESEINKYKSEILKSSLHERTQKGYLYIKESKSDNTNVRNHRARYNCPPGIIRVPYQFATGNVIRPTDDVPETGFPIHPRIKAIITNSYPTYQTAINEFVRPLGTTEATVTDFLKEQRPSDPPIYSRKQRILKHIHHFLASKPYRPLHYVDSLYSGLPLHTGTGYHNRHSFRAKCHAKFSHPARYNGKPTSKGYFYNFTRLRNRTYIHQIKLRGHPLSQNGPDTKTRIKHFLLKRPTILFTRSHISKRKDNLKQRPVYCADELFLDLESMLTFPLHVTARSPSCCIMYGFETLRGSNAEINRIAQHFRSYLMLDWSSFDQRLPRVITDIFWTDFLEELIVINKGYAPTYDYPTYPDLTTENMFNRVTNMLHFLHTWYNNMVFVTADGHGFIRTAAGVPSGILNTQYLDSFGNLFLLIDGLIEYGKTDQEIEQLKLFIMGDDNCIFTQWSLEQLESFFKFFITYANQRYGMIMSETKSTITSDRTSIETLSYQNNHGFPRKDITKLIAQLCYPERGVNVKFMSARAIGIAYAACGIDPEFHKFCESIYNEFKSDSIELDNLETLLTAQSKLPGYLKVDETLLQTIDFSQFPHIDMIRNLVLKWHGPLPMSPKWNESHFINSPNEHEKDYITALGYRKHYRVQRKPIPNLWK

SEQ ID NO: 1231 - protein, 719 aa, Turkana Partiti-like virus 1
MENTIQEEFIEMRDFLEERSHQLNERWRLINQHNLKDANGVIDYDELERLHIEENVNRPIQLITSAEGYEHDINELIENYKASNIARDEDFEFFRPIKESDKIPERVNVEQGLNFVPLKYHKTRPKTASQQITEEGFKPDKPLLDLINNYYPEYRRIIEEYRRPLGTTDSTFNDFNKPQKPSEPFTQERKDRILYHLKKKLNVKPYKPVYYESIAFCKMPLNTGTGYFDRYHYRTRARARLTRSGIYKDKPNSKGYFYTATYKQHQIIVHNIKHYRSPVIIKTNSDKIKRNKIVQDFILKRVTMLFTRNHISRLFRLKTRPVYNVDPIFLKLEASLTFPAMIQARPISSCIMYSLETIRGGCHYLDHTAKNYSSYFTIDWSSYDQTLPRVITDFYYQDFLESLIVINKGYTSTINYRQHIPQPADVLFKKAHNMLNFLHEWYNSMVYVTSDGYGYQRTCAGVPSGLFNTQYLDSVGNITLLIDALIEFGLTDTEIDDIKLFIMGDDNTGFTHMNIFELDKFVNFFGRYSKRRWNMDISLDKCKVTEDRSLIEVLGYSCNFGYAKRSIDKLVAQLCYPERGINIKYMSYRAIGIAYAAGGHSSTFHQFCERVYFIYYKDRVDITSDVRKKVVYHLPGIFRAVDNYAEFINFEKFPTIEEVRKEYSEWKGSLSYEPRWDSSYFTDPPYYDGDDYITIKDYKKIHNIEDLPVEFHDFTSLSN

SEQ ID NO: 1232 - protein, 472 aa, Turkana Partiti-like virus 2
MLRYIGKTTGFASRTFARISKTPYLNDLPEPTELWRSPVTQHLIEKDLREFDNSCKRPDSYELDLAIMDAERAFRLENRVKMIHLNDVFQQDLEIWTRSPGLPWKNHGYDTKDAIRKDPDAVQSVRRFWHFVKLGKPISFPDCCAYVRSHITERDSYKVRAVWGYPATITFGEAVFAVPLIRGFQREQKTIAYGFETFLGGCKKIRDYLGGAPWYAALDFKKFDKTVPAWLIHCAFAILARNIDFGNYEDYGTADCLRMYHMYKTLEDYFINTTIRTARGHRFRKNSGIASGSYFTQLVGSICNYIIINYLFRKQRINIINLKVLGDDSIVSSTEKFDLMQGQIDVMRLGLRLNIGKSDISNQLDDLVFLGYKINHGFPLKSHNDWLASLLYPERPDESFDDVASRALGIYYANMGVDPIIHKLCYGLIKLKPFDLKLSTNFERMLRHIGVTTMNPQNPPDSVEFMVRMGVL

SEQ ID NO: 1233 - protein, 262 aa, uncultured partitivirus
MTIEAQYEDMMKMNQPPVHIVQDDAFNTAFALTMKAFAPTEKVRVVHYVRTKHYPWPLSSSVERPFSVDPTVRKYVKEKCIAREIVDEKMSFHNTFEYVYNALRHPVHRIKNGECFTGDLTKDFLYPITAHFRPGLGKPGSTAIKNRLVWGVSKLFLIAECMFMYPLFDNYLRHGTTPMLWHYETILGGSTKLHNEVTPQISRTQVTVITADWSEFDRRVPFELIEMVINASLEYYDLGYYAPDYLYDTRSSCKYDIPRILN

SEQ ID NO: 1234 - protein, 539 aa, Ustilaginoidea virens partitivirus
MEDFTQDPTHHYVLGKGSRLIDALHLRPAKEGQANSEEIVPSNFKSDTLREIAKYGGYSTYSSNSNTDPHVREALKLFSRDIYEDIRGFTRRPQGTPGMYGALAKFSGERNAFSDLSASQQASMRRAFSKAKRAFKLPYKREPLDWHEVGQFLRRDTSAGVTFMGAKKGDVMEEIYHEARWLGHRMKQDGRDSFDPTRIRFPPCLAGQRGGMSEIDDPKTRLVWIYPAEMLVVEGFYAPLMYRDFMSDPNSPMLNGKSAQRLYTEWCCNLREGETLYGLDFSAFDTKVPAWLIRVAFDILRQNIEFSTFQGKPVNKEDAQKWRNVWDAMVWYFINTPILMPDGRMFRKFRGVPSGSWWIQMIDSVVNHILIDYLADCQDVEIRNLRVLGDDSAFRSSNQFDLEVAKQDCVPTGMVIKPEKCERSEDPSDFKLLGTKYRGGHVFRPTEEWFKLVLYPESSVLSLDMSFTRLIGLWIGGAMWDRKFCEFMDFYQSAYPVPEEGWFSKDQKRWLEVVFSGRAPRGWTTKKSLFWRSIFYAFG

SEQ ID NO: 1235 - protein, 529 aa, Ustilaginoidea virens partitivirus 2
MNSFENFGSFKLSADELAATAVPPTPWNNVFRYITDAKRFPGYKRGILRQTQLYDPYVNAALKSFSPELHDSIKGYTRAPGDEWDVYERLTRYDKSPLAPVDNPRFKACYDAALSDVMKEFKLRDPVVPHWILDVDLVKNTSSGFPHFTRKGDILDQIRQEGRSHFHLLKRLPLWRVPLLPCTPATRGGLADITEPKTRLVWMYPAAMTAVEAVFAQPLIDGLFSEKSEYLITGVDTKHRIQRYLSLLSEDTGRLGVGLDFKSFDTLRCNWLIRDAFDVLKQNVYFSGYYDDTNGLQTFGPGKTERLEHAWSNIVEYFIHTPILLPNGRCVNKHTGVPSGSHFTNLIDSIICRILIKTFSLYCSIPISNLRTNGDDSAFHVYEDYASDIILRAAGFFKEFFGMTINTDKSCVAGSPSEMHVSGTRWTGLRPTRSTQEWMMLAAYGETYSRIPFDSFQRLLGLGLSGGFGDSTFTRFFDYFQTGYDCRHGPNLLNWKKLRFLQQIFSIEELPLVYKQGAKTTLRLRLLVT

SEQ ID NO: 1236 - protein, 522 aa, Ustilaginoidea virens partitivirus 3
MDYSVGGEETFGDKFHSVWDFPLRHLSELKTMDFKRGVLRQTQAYDPFVDEALRHFDNDQRTRIMGYTRAPGDEYDLAERLRRYDASPLHLKFTNRRFAAAYSEAVAECMDELKLHSPVVPRWIKDVDLVKSTSSGFPHFKRKGDIIEDILQEGRFHFHHLKLYELDRCPLLPCTVGVRGQLSEKHDPKTRLVWMYPAAMTACEAVFAQPLIEAMYDEKRDYFLTGVDAKFRIQRFLSLLDGDKDALGLGLDFKSFDTFRVTQLIYDAFAILKQNILFGYYYDDVTGVQKGRTGVDVRAMRAFDNIVEYFIHTPILLPNGRVVKKHLGVPSGSHFTNLIDSIVNRILLKTFSKYCLRPLHGLRTNGDDSSALVSRCYASDIIDEASSFFSSFFGMTVSVDKSVLAEGPSTMHVSGTRWLELRPYRPTDEWFKLASYSDTYVATPFDSFQRMLGLGIAGAFCDSRYCRFFDYFQRGYDCWKDSPNLLNWKKLRWLEHAFGITELPIVYKQGSRTTSRLRLLVT

SEQ ID NO: 1237 - protein, 200 aa, Ustilaginoidea virens partitivirus S2
MMTVDFVYDDTLGEDIPSVWDYPLRYVTDTKRYTGHKRGILRQTQRYDPFVDXALKSFDPELARRIRGYTRSPGDEYDLFDKLRKYDHAPLELPTGSSRLTACYEIAVEETMRELKLEAPIVPHWILDVDLVKSTSSGYPRFKRKGDILDQIRQEGRFHFHHLKLYDLHRCPLLPCTVGTRGGLSESRDPKTRLVWMYPA

SEQ ID NO: 1238 - protein, 440 aa, Vaasa partiti-like virus
MRNDYEMDSNPGSCDAPIPIIRNYDKDHPYEFEWRAPPHVDDLTVGPALRLLEKKAPFPASYFPPHISVNACYVFDQCGMKPERVKLLEKYQRSWVTKDSLRKSTLGYSHVKYAPAFNDQRLDDAIEEVRKEFVHALSEPLKAWTIEKVMKEGEMPKQTSPGLPYIQQGYRSKADVWKDHHQDIEAEHVRIRQGHQVRMPDCAAFARSIVCEKPKNKVRLVWAYPLSQVLLEAKYTQPLLQAMTAQKIGVSVAYGAETMRGGMEWLNTELHSLPRQNYVCVDFSSFDQTIPPWLIRIAFDILEECFTTSEVEDVNGRIIKTNATIVAREWRQIKHYFINTPLRMEDGTRYQKTGGVPSGSCFTNIIDSIVNLIVMRYVLRSTNGNWPSFLTVLGDDSVTATTGLINLDDMAKVAKGKFGMIINVEKSYWTQSIGNVQFLG

SEQ ID NO: 1239 - protein, 444 aa, Valsa cypri partitivirus
SVTTPFVNEALRHFDNDLRKSLKGFTRTPGDEKKLRASLDKYDVPTRTFENVFHNNDKLKQCYEQALSECMSEFALDQKVVPKFPTAVDLVMDSSSGYPHFTKKSEIKKMILHEXRTWLHQAKSKEFRRLPLLPCSVGVRGALSPEDDPKTRLVWMYPAAVTVAEGVYAQPLIKALYEQKADLFLVGTESRFRLSKYLSLISEEKGRYGVGLDFSSYDTFPVQDLIRDAFAIMKQNLAFGTYWDPENGNVTAGRDDLRNFERVRARAEKGYDNIMEYFIHTPMILPNGRIVRKHHGVPSGSHFTNLVDSIVNRLLQKTFGLYTGRSIRDLRTNGDDSAFTVTDTYEPNILKDAAEFFKLWYMIVKPEKSVVAGTPAQMHISGTKWSSLIPTRTTQEWLMMALYPSTFVKDANMAFQRLLGIGIAGAFYDATYCLFFEYFQTGYD

SEQ ID NO: 1240 - protein, 134 aa, Valsa malicola partitivirus
AKMRFPPCLAGQRGGMSDASDPKTRLVWVYPAEMLCVEGFYAPEMYRAFMEDPNTPMLNGRSAQRLYTEWCVGLRDGEKLVGLDFSAFDTTVPTWLIRVAFKILRQNVEFDTFRGERVSKRDAQKWRNVWDAMV

SEQ ID NO: 1241 - protein, 467 aa, Vandelay partiti-like virus
MAYIGKTYGFCQRHFTVTESHYCPNLAILKTEDLVRSPVTLDLIREDVKQFQSPSPMRPENDIFDSVVRDAFKAFQVEKVHPIHLNDLPQLTSDTDNSSPGLPWRDRGYATKRSVLDDRDAFQSVRKFWHRIKEGECMKAPDCSAFVRAHLVKSGETKVRTVWGYPATISFQEACFAKPLIEEYKRQGPIAYGYETAKGGCRKILNEFCHYKYFLSSDYKSFDKTIPAWLIRIAFDILTFNIDFTEYCEYGVPVSRKLYQAWLFCIDYFINTPIRLCNGERYRKRKGVASGSYFTQMIDSIVNWIVTTYALRSMGLTVDKIMVMGDDALAAVSGHVDLKLFAEFAQECGMYVNIEKTQFSECLNDIKFLGYKINGGSPLKDPKELWAALRFPERPDRCFDDFVSRAYGLMFANFGNDIEFDNCCRHYVEKPFTIRLTPNMIRFLKILGIDALPLEPPTRFQLQLLRY

SEQ ID NO: 1242 - protein, 553 aa, Vannostrand partiti-like virus
MDAPKSYITKTRQMPSNLTTLRNLPKGKGFPMRLLPPREDPLARAATEQYFGLEKVAKVMAKYHRSTISYEAMLSDLKRYDCKRAPRLEDDLYCAVLQTVIEDILPKERIIPYKIEVVSTLAEFPNTKSPGLPYKLEGFKTKREVIEAGKLSDISTTWREIGFGKKPRLPDVCLFARSQLAKTGKEKIRATWGYPLSVYMEEGRYFYPFQDHIKSHEHNFPIAYGLEILNGGMAMIDTIVKRNENAKYVMTDWSQFDKTVPAWLIRDVFSIIGMAFDFSKERDANGNIYHVRPAIAIKRWRYMINYFIDTPIRTCKGERFLALGGVPSGSCWTNIVDSVINMILSRYLVFDTTGHFPADEIFLGDDAFLCVNGTVNLDDMADLALRKFGMIMNVDKSYVTTQPANVHFLGYYNKSGNPFFSMDPLIASFIQPEYERSTLLERCSAAIGQMYCCCDPGYAVLWYKIASSIAASDNKTFEEVFIYTRDSYHRNKDLQQMGLTQEKMTVPSICHDYIMDVLPPLNCRIFIRPRKYNYNELWERTILTFKDSPLDPE

SEQ ID NO: 1243 - protein, 365 aa, Varnsen partiti-like virus
MYIARGKGFEPPQPSPYLSSFHPLCGNYTGSEVALSLIREDIKQNRMNEHAQQPNDRLMTYAIQRAFHAFKLPNKPPLLHLSDVFQQDLPIWNSSPGLQWNQCGYRTMGDIRRDPDAIKRIRYFWYQIKTGHDIRLSHCCAYVRSHICERGESKVRVVWGYPATVTFGEAVFAVPLIRAYRKHPILQRFRGTQFLGIDFSEFDNSLPSWLMKAAFSILAYNLDFTRYQDHGIPHTDRAITMWETITDYFIHTRIMMCNGKLYRKKSGLASGSYFTQLVGSICNYILLTYAALKCHVRFENLFVFGNDSVMSTCDRFTPDHIQEVLDGLGMTFNVAKSPISRNISYLPFLGYGISNGYPPLIDIFK

SEQ ID NO: 1244 - protein, 539 aa, Verticillium albo-atrum partitivirus-1
MSDDIEIFDLLASPGEQPGSDETFASYGTPSSRTARRHVQAGEYFIGTGLEEIARYGGYSSHRASGNTDPWVRETLKLYDPERYESIYGFTRTGEGLLGAYKSLFKFDGPVARGTRLSTRQRSAMKKAIADARTAFKLPVKHEPLDWHEVGQFVNQSTSAGVSFPGKKKSEVMEEIYTAARWLGHRMKEGGKESFNPTKVRFPPALAGTRGHMSPKDDPKTRLVWVYPAEMLVVEGLWAPVMYRQYQSLSDGPLLLGKSAQRIYTEWCVNKKQGEVLHGLDFSGFDNGVPPWIIHVAFDILHANVDWLNWRGKPTSKRSRQKWRNVWDGMKWYFINTPILMPDGRMFRKHRGVPSGSWFTQLVDSVVNYILVKYAFNCQELKIHGLKVLGDDSAARSPLKLDLVQAAVDFRPVQMRLNLDKCEITEDATEFKLLGTRYQDGHSTRPDEDWFKMALYPENPPPDIAVSMTRLVGLWLGGAMWSADFCKFFEYFQSSYPCPSEGHFSKDQRRWLEIVFGGSAPRGWTYKESLFWRSIFYVF

SEQ ID NO: 1245 - protein, 539 aa, Verticillium dahliae partitivirus 1
MEDFTQDPTTHNIVAEGSHLIDALHLRPPKSRSATSEDVVSSNFRSPNLAEIAKYGGYSTYSSNSNTDPYVRETLKLFSRDTYEDIRGFTRRPQGTPGMYTALKKFSGERNTFGDLSPSQQSSMRRAIGKAKKAFKLPYKREPLDWHEVGQFLRRDTAAGATFMGQKKGDVMEAIYHEARWLGHRMKQDGRAGFDPTRMRFPPCLAGQRGGMSEIDDPKTRLVWIYPAEMLVVEGFYAPLMYRDFMSDPNSPMLNGKSAQRLYTEWCCKLRDGETLYGIDFSSFDTKVPAWLIRVAFDILRQNINFETFGGKPVDKQDAQKWRNVWDAMVWYFINTPILMPDGRMFRKFRGVPSGSWWTQMIDSVVNHILIDYLADCQRVEIRNLRVLGDDSAFCSGDQFDLELAKGDCEPTGMVIKPEKCERTKDPGEFKLLGTTYRGGHVFRDTEEWFKLALYPESSVLTLDISFTRLIGLWLGGAMWDKRFCEYMDFFQSSYPCPEEGWFSKDQKRWLEIIYSGKAPRGWTSKKSLFWRSIFYAYG

SEQ ID NO: 1246 - protein, 540 aa, Vespa velutina associated partiti-like virus 1
MKDLGEAKTKIRVKYPRNVSKAVKQLSDGQGFVMNMTPAREDRKAREACDLYFGPELVGRITSHLQRSTMNYEAIIDDLLEYDRAHVPKNKIVGESRVIYDMVIQSIKDDLGTPNLVPMEYEEIRSMPDFPGAKSPGLPYKNQGYTNKAQVFDDPACLEALKNTWRDVGHGKNVHLPDVCLFARAQIARHPKQKIRATWGYSFDIYMEEARYFYPIQNFIKQHKHNFPIAYGLEMANGGMSSINDMLMRNKGAKFIISDWSKFDKTVPVWLIRDAFDILFGLLHPNRVGVYTRRRWKKIVDYFCETPIRTCKGERFLVTGGVPSGSCFTNIVDSIINCIVTRFLSYQTTSEFPIGEIFLGDDGVFVMRKHACLEDFGSLALLYFGMILNVDKSYVTTNPSNVHFLGYFNLNGVPFKNQDYLIASFVYPEHRRTKLIDACAAALGQMYSGFDPYFARTWLKIIHYLADNERSDPFSMDEVVIHLRSQEHRHKYLSHVGIKGEHMTVPSLAQTFIHDVLPKPNCNINLPNRYYDYRKLCNST

SEQ ID NO: 1247 - protein, 412 aa, Vespa velutina associated partiti-like virus 2
MQYSIRTIIADFHFSCVKDRPKPTKVNSPHTKDVAPILRKFLAKHRPRPEKFVIPEFPFLKSSYRVRHLMDAIANLSQQSLSSSPGFFYKSKGFMTVKDVISSVDNIRRIRARAHYIKKGSGKPLPLCTVSVARAIYDLEKKEVKRRVAWNFPFLVRIFEQMFAQPIIEQLPDHYILDPKTHHNTLCGEGSVKTDFSNFDASVPYWLLKECVDNLFARIEDDYEHDEKKLSLMPLLAALRLYILRTPYIYKGGHYRKYHGVPSGSAFTNILDSMASYALLYNAHRECFGPCYIATYGDDAAYRCGCSFDHVARYLEDECGMKVKKEEGLGYGCIVYCKKYCYFGTPIHPTLWFVNILNCVRHWKYRRGVAWQLAHAPFNPTPNQYDLLIKRYRARPGPLPRRLLEYLNLLRE

SEQ ID NO: 1248 - protein, 445 aa, Vespa velutina associated partiti-like virus 3
MAQRVTKHPFQTKWIRSKPNPTKIIERIQKYFCRRPPRPTNYRYSSALFKAREAFRLPSRVNPFHVNDVIRHYSHPDRSPGLPYTKEGLRRKDEVDPNRIKWAVHAMKYGIWTKCKTPCNAVAKTAVHPTEEKLRLIWVYPAHMTFAEGMFAMPLIRAYKKQLGSPYGIWIRYQCGDMRYLRSKKIAGYTWLAADWSGFDSTVPPWIIRDAFQILLENLDLSRYEFRGIPTDATSLPRLWKTIVNYFINTPIKDPNGSVRIKAGGVPSGSYFTNLIDSIVNYIAVAYLLDGKNYQPSAFYVMGDDVLVAIKEGEISLKEFATEALDVFGLELNVSKSEIGEFPSFLGFKFTLTGVPGSDYDRLMAQLLLPARPDRTPSEFYARIRALQLASFGGNKRFLYETQFYLESVGCPHPPRSLHRRDELSDKLEHLGLVGWPPLESILAI

SEQ ID NO: 1249 - protein, 155 aa, Vespa velutina associated partiti-like virus 4
LEYLMDFTKYSDGSKTNASRLFNCWDFIVKYFKFTTIRLATGERFKKLVGVPSGSFFTQIIDSIVNHLIINWAFIKQTGEPPKYIKVLGDDSICSSEVKFDLDDAQDDFALIGMCLNVSKSAVSRHLGNLEFLGYQINDGVPSRPYQKWISSLAY

SEQ ID NO: 1250 - protein, 488 aa, Vespa velutina partiti-like virus 1
LEFSLIIAFVLNNTKAMIKLNSKQGFGLKPNAVDYSPYAVHLLGPRPDLSIRSRLSFRLVKQDVLQMGRNSFVINDPDYRYAVLLAFDAFRLEERVVPIHLNDIFDMDLEIRRSSPGLPWMPMYKTKGEVMDCSSARNSIRWFWHNVKKQVRVYPHDTRVLYRSHFMEDGEPKIRAVYGYPATMTFGEAQFALPLIKAFKNVNTPIAYGYDMISGGAMRLRREINKYKFFNCVDFRRFDKTVSKQLIVIAFSILEQNINFTKYQDHGVPDGRRLYRSWEFLQEYFVHTLVRLPNGDRFQKKAGIPSGSYFTQLIGSVVNYIILTYASIKLTGRPPQYIKVFGDDSVFATHEKLDLYDLARFIDSIGMEINLKKSIITEKVDEIEFLGFCIAGGFPHRALDKWLTSLYCPEYPDSCIDDFQSRALGLAYANHGIEPTFDAICRAIITCSPFEVMISRDFGRYLLNIGVDPSSLSRNLPTRREFMFSLIR

SEQ ID NO: 1251 - protein, 457 aa, Vespa velutina partiti-like virus 2
MLNNALKLSSRLRYYDYVMLLXAMTILMHYLTCGCVRRPTLFQQPTKFRSGFRDPKPILRKFYAPRAVRLNKAIYQQALNEVQHYFSDIFHNLRPYHFNDRLSDLAEPTSPGLFFKRKGFRTKAEVLSDTKALQRLRYTVHRMKSGIEREADKYLSTVVVADAKFDINSCKTKARVVWVYPLEICAAENMFFAAIKDNLPDDWVPTPAKYHFRFCGRSSGSADYSNFDSTVPRKVIYDAFSIMRSWFSFSTYVGGAKPYSTTSLDRLWSFLREYFINTPHILPDSPEVIRHKTNGVPSGSMFTNIIDTICSRLITTYLHRVNKCQATITTYGDDVHFRDCVCQPSELETRAGTDFNMRLKYEPPNEHGCLTYCKAECHQAKPYHEGAWYVNILNCCQTRYKGATTECLMYTEPTRMQMSQLRDIVAVHPPERTKWFDRWQRKFFEYWPKFKKKVSGL

SEQ ID NO: 1252 - protein, 469 aa, Vespula vulgaris Partiti-like virus 1
MYSLPSKHGFSQRHNNDPTPSPFLSCEELTRFRRSPVTLQLIRDDLLRYGNNTKRPSCSMLDLAITHARRAFQLPDPEKMIHLNDIFNRSDLNIWKSSPGLPWKDLGYATKNDIRMDQQAINSIRLFWHRIKYGNKIELPDSCAFVRSHIVEYGEYKVRAVWGYPATVTFGEAVFALPLIEAYQKYSSPIAYGYETAVGGAARIIRESKGKYHYALDFKNFDKLVPSWLIRIAFDILTLNLNFAEYRDYGVADARRSYCMYERIIDYFINTRIRLCSGERFIKRSGVASGSYFTQLIDSVVNYILIMWAHLRLTGKTPKFVKVFGDDSIFSSDELFNLVHAQEVFDLVGMHLNMSKSVVSQNIHELTFLGYQLNHGFPSRPFDKWLTALMFPEQRDRAWDDVASRALGLLYACAGCDSKFDSLCRMIINLKPYDLCLSRGMMRMLTIIGVRDVCKTPPDVWTFWKRLGV

SEQ ID NO: 1253 - protein, 536 aa, Vespula vulgaris Partiti-like virus 2
MSISLQTKTNARYKTCDIVSFEYEHFDEDVVFPLVIHGSELPDGSGFPYKLERPSLSFKTYRAMAEKGLKNVADRVITTKSRSHITPDNIWQGVLKYAGSVPKRCTDPVYQRCLDDLRAEVGCELSVMDMDEAVKHIPASTSPGLPFIKTHPGKKKGEIISQFREKFSGYWDRVGRGKPVTPLPDCAAFARSHVGAAGNNKVRPVWAYPVEAVVEEARFSVPLQNALKNQEIGHQFAYGMEMLKGGMTWLNTNLQRSRRRDPGSKFLMIDYTGFDNSIPAWLIRDVFDIVLSLFPHATIEDKRRFKFIVNYFINTSIQNMDGRRFQKWHGVPSGSMFTNAIDTMINFVVTRYCILKTTGEMPLFFNCFGDDSIASIDGRCLIDLEQFAAAALVFGMVVNTKKSYWTNVITNVHYLGYYNLHGDPVKPDDELVASMLFPQYLKDDWAYCIARSLGCLLASCGNSPNVFLAAQGVYWKAHREKSVNVEEGLRLIRTNPRMLRHLANMGAAEFDLSPEFFFRNDYSYPRLDCTKIMKRI

SEQ ID NO: 1254 - protein, 576 aa, Vicia faba partitivirus 1
MKNITVIGNLPNLAKPIYGGSTADTNPAYAETVDHALYKFLSPEEAELVINGYRRSPWNDEALKDDIAKLDSPYFQVTKDEHYYKAIAHVKKLFTPDTPLKPVHFADLRHYPWQLSSNIGAPFATSPEWQDYINKKFLTGQTAENYRDLFKEAHHTDLYPKMLDRRMTKRNLYNEMFLINRKSIHIIKNGRTTNDHGHDLKYWNTAFARQHLVEDDDPDKVRLVFGAPSTLLMAELMFIWPLQVSLLARGPQSPMLWGYETLTGGWSRLFSWASDTMPRYSTVLTLDWSRFDKDARHTVIRDIHAMIMRPMFTFTEGYHPTISYPNAPDTNPDRLENLWNWMTDAILTVPLMLPDGQLLQFNHSGIYSGYFQTQILDSIYNCVMIYTILSRMGFDLDKFCIKVQGDDSLMISPYNYTLLEPSFLKTFGDYAKEYFGSTLNLKKSEILPSLDGAEVLKYRNHGTMPQREEIQLLAMLRHPERTASLPSLMARCIGVTYANCGNFNRVSRICEDIYKFLQAGGFTPDPFGLPGGLRYRQNYIPSYVPIDLSHFPTYFENVEHLQDPHKPILSEKHWPN

SEQ ID NO: 1255 - protein, 478 aa, Vitis cryptic virus
MQSTLSGYVYSNFQADLEKTNIKHPHLVRREPNTTYRDEYALSELMTISPELYSQILEGWSRSYYTRDKHLEAILAYSHPNIHSSSVDARVYWQAIDEVKKGLNSLPLVRAYDILSELDKVSFKSSSAAGYDYIGAKGPYDGENHSRAIKRAKAILWSVVEDNIQGMTHAIETAVPDVGYTRTQLADLSEKTKVRSVWGRAFHYILLEGVVADPLLQAFSSSDTFYHIGLDPLDSVPALLSKVAQSSKWIYALDWKQFDATVSRFEINSAFDIIKSKVSFPNKETETAFEISRQLFIHKKIAAPDGYIYWSHKGIPSGSYFTSVVGSIINKLRINYLWLTLTGHLPKHCFTQGDDSLVGDDILLHPDKIGEVANRIGWYFNPEKTEYSTVPELVSFLGRTYQGGFNTRNLTKCIRLLVFPEYPVTSGNISAYRAKSIAEDAGHLSDILNRIALKLERHYGIASDEEVPHYFKRYIHGM

SEQ ID NO: 1256 - protein, 472 aa, Whatley partiti-like virus
MLQDRGPFRRAALKSYISQMSRPNPKGIFDGFVAEILDQQGFVWEEDPRSIYDPQQLYTALERYATEWQQFEELDDALTFGFRKAFKIFAKPKDEKPLRPYEDEEVINEALKLEKSSGLPLMTTKEKSLVYSFDRESQIRSGMKAPNPCVAYKRTQRGNKTRLVWGYPLEMTIMEARFARPLIERFRQMATPMAFCMSKMELGAKLARYFEEQPGTTVCLDYSKYDTSISRTMIYQAFRILRTWFSDEDTKELGWDTVVKYFVFTPIVMPNGHLYTGKNHGVPSGSYFTQMIDSIVNVALVYALKYACGLKFEDRSLYVLGDDVIVQVRTKVELKKWATWLAKHGITLHDDAKTVVGEVHFLGAFWTKGKPDAPIDELVNKACFPEAFRVYQDSPSVGAENVLRSYASSYKSAWRFLPLVRPDMRLIDLPTQDDYLAKYMSGSDRYLFEENRMAYRKSHSMIRPALCIRYLL

SEQ ID NO: 1257 - protein, 616 aa, White campion partitivirus
MDYLTSAFERITHWFVKPTNLEYIGNYSTPPSIVRVNEVAIANHKKTLEHAFRKYLYAHELQLIMEDYRRSDIDQESILADFFSGDVEHFEIPFDEHIEVGLRCMADAFRPPRLCRPVHILDVKHGYPYKWNVNAEPPFSTDPYFLDQRKTFGEFISMHEYEHIDKADFFRRHPNIESHDLLQTVVPPKFGYLKSMVFSWTRRWHHVIKTGFKDLTNLGPSGYIYNRFIFPMLLHTKTAIVKRDDPNKMRTIWGAPKPWIIAETMLYWEYIAWIKLNPGKTPMLWGFETFTGGWIRLNNQLFCGLIKKSFLTLDWSRFDKRAYFSLLRRILYTAKTFLTFEEGYVPTHAAPYHPKWNHDKTLKIERLWLWTLENLFEAPIILPDGRMYRRHFAGIPSGLFITQLLDSWYNYTMLATLLSALGFDPKQCIIKVQGDDSIIRLTTLIPPERHQHLMDRLVQLAEYYFNALINIKKSEISNSLNGCEVLSYRNHNGLPHRDEIVMLAQFYHTKARDPTPEITMAQAIGFAYASCGNNKRVLWVLQNIYDYYKSLGFTPNRAGLTLTFGDSPDVFMPEIPLDHFPKLSEIRNYLTCSEYRNEAQDARTWPRTLFINAPAE

SEQ ID NO: 1258 - protein, 509 aa, Xanthi partiti-like virus
MSKNRKQAFVRLPDDLGFPFSLLPARKDEWAEEVCSRHFGEIPISKVLGELHRSTISYDAMLQDLMAYDREPQICNRDDVYFAVLNSLRKDLEHFPTIVPLTMGAVPQRPDFPGQKSPGLPYKLLGYSTKQEVIDAGLLHEINKDWQNIGFKKRKVELPDVCLFARAQIARRGREKIRATWDDPLDVYLTEAQTFYPILEVLKNKPNSQQSLYGVEIGTGGMNSRQRDAGRNPDSQYLCVDWKQFDKTVPPWIIRDAFSLLAEKIDWAHVQDVEDKIWPVAPEPSKRRWKRMVDYFINTPIRTCKGERFLVSQGVPSGSCFTNLIDSLINALVMRYLIYSMTGSLPFDEMYLGDDGVVVVNGIVNLEDMATVSFEKFGAILNVEKSYVTXXXXXXXXXXXXXXXXXSFKNQDFLIASFVQPEHTRKDALDACAAGLGQLWSGFDAVYAGVWHRVILDLAAKDGLSRDEVVTRLRSTAHRHKYLMHIGLNPKTLSLPAPNENGLVLDVQP

SEQ ID NO: 1259 - protein, 609 aa, Xiaogan partiti-like virus 1
MNNIEYLKTLPGNYSLNRFRGDLSELAQSRFERVYRYALLFYQKEEVDRAASNRRSKTTDEAVIADFMTFEQPPHPIPRDVHFESAIRRTRELFHPGRTLYPVSYPDLRYYPWNLRPNAEAPWNLPDFRFTPTFRNLDKESESPKLKEHIEKLSYYISERKIKVFDYLRNKHAFGLIDNTYHSFHNLYNEIFQYNRYQIHAIKDGLHPFWDKQGNPVPYYWNTLHARSHVVAADEPDKIRAVFGATKLLLMAENMFIWPLQATYLNDDSVGRLLWGRETIRGGWRKLFSEIHKDGKPNSFLSLDWSQFDKRLLFELIDEVHTIWRSYFSFEAYQGTTFYPNASTEPVRIERLWRWMCNSIKHTPILLPNGSLYRWTRNGFGSGYQQTQLMDSFANMIMILTCLSALGVNIDSESFWIRIQGDDSLIALYENIFAIYGPSFLQMLANAAEYYFNAKLSTKKSQFSDELNNMSVLGYFNYYGLPYRTDEDLLRHLMFPETPGPQEQLLAAAIGLAYSACGCSIAFHNLCEHIQKRLESKGRTPDPRSLDWMIRARILDEDEVREMISNPIPSRLTLIARVWLSTDRTRVQKERLWPTEPGPRERFFFLPMV

SEQ ID NO: 1260 - protein, 411 aa, Yarrowia partitivirus A
MESESETEVLAEELSIVALIGETRVPEPIEQQRGSRTLAQVQSDRYEELNIPWDSEIVSLRPSDVQRSSPWYITPTKSLRSKGFLESYEYNGECETRCHSILQFDKWRNARRNTYRTCLSNHTEAHELVNLELVELIDSSVVMSGKGKFPLILSELDTSGSPGLPFIRRSSSIPDQEADIIQATRTFHAFTKARWSPTGVRAPPCDIRERERSLWSYPLMVTLLEKRFSTSLNEKLQEFNYPMFRDISDRRTIIRMLFQGPATSDVLLEVKLNYFYSSVSSDVIETVFEMIESWSLHVKETSKKTWSFVKHYFIQTPILLPNGQLVKKYSGISYGSEYTRIVGTLVANILAIVLLSSQGIPAKFFQTKIHYSSKRETIFLRVPKSFSKETMVSDAKRYGFNLRVSEISLQN

SEQ ID NO: 1261 - protein, 539 aa, Yellowtail scad partiti-like virus
YTVDTYNIIRTKRPNSSRSFPVNQANTKPNIYAIKAITEVYGVDKANEVVNNYKRGKITIEAIVKDIYRMNSKGRNRPDCTYYQQALKLYTSTIKPNVPFKTVHFCGVRFYDLNKSGSAELPYTKDEKFKKYIDDAFDAGLIENKSLSKGNGMDYILTRERNIIHLIKDGQYTVTNAEYTQAHSRSHLTSSFKEDKVRFVAGAPCTMIFIEIMLLWPLINQEIKRKDSFIAWNYATFKGGLIKLKDEFSGAKFILNLDFKAFDKLIPFYLIDDLHQIIYNFCDKESYYIDDPNHRNPVAIRERIDRLWKFMNSYFKEAIYVVPDGSCYKRKHSGLASGLLQTQFIGSSCNFIFIASSLLSYGLNESDFKIKVLGDDSCIAIYADVNPKSLLNHMSKYCFDKFGAIINIEKSEIRTIDNISFLGYQVKHGAVCRVNDDLLGKLTYPEKPNFTPENNLSRAVGISISNLGYDENIHHVCSSIIRRLQTHDIFNTRLNWYDKTKLHHVIKKHGIQPSRKDLLTLGRVYSDEIPDTNFDKYLN

SEQ ID NO: 1262 - DNA, 1807 bp, Alphapartitivirus sp.
  source 1..1807: mol_type = other DNA
atggactatttgactacgctttttagtcgattaacaaattttgtcttcggacaacgaaacttagaatacgttggacgctaccacgctcctcctcactcagttcgaccaaacccattcaacattgaaaatcatcagaaaacattagaccatgcgtttcgacgctacctctaccctcctgaaattgatatgattgaaaaccaactccgtcgctccgacgtctctgaagaagctatcctctccgatttcttcgctaatgatgttgaacctcacgacgtacctatggacgaacacttcgaatacggccttgcatctatgctcgacgccttccgacctccacaaaaatgtttacccgcacatctctacgatgtcgaacatcactatccttacaaatggcaagtcaatgctgaagctcccttctctacagatgagaactttctcgcccgtcgtcctacttttggacaaattttcgaaagattatccgacctctactcacatatcgcagtagactggtcacgacgctatggcaataaaaagaacgatcagacgtttctcaacgatgtcgttccagcaaaattcggtcctatgaaagaaacagtcttctcatggacacacagatggcaacacgtcattaaatccggtttcaccgacctcgccggactgttcaaagactattacttcaatacaagatacattttcccgatgctacttcacacgaaaacagcaatcgtcaagaaagatgatcccaacaagatgagaacaatctggggctgctctaagccttgggttatctccgacactcagttttactgggaatatgtcgcctggatcaagctcaatcccggcatcactccgatgctttggggctttgaaaccttcactggtggatggctcagattgaatgctcaactcttctcacagtacttacaacattcgttcgtaacgctagactggaaacgttttgacaaacgcgcttacttttccgtcattaaacgaatcatgtacggtgtacgagaatttctcgacttcgaaaatggctatcttcctaccaaggactaccctgacacggtgtcagactggactcacgaacgttcgctcaaactagaacgcctctggctctggacgcttgaaaacctcttcaacgcaccgattgtcttacctgatggatctacgtatattagacacttcgcaggcatcccctccggactattcatcacccaactcctcgactcctggtataactacacaatgctcgcaacccttctatccgctctcggcttcaacccgaaagcttgtatcattaaagtacaaggcgatgattcaatcatccgccttaacgttcttctccctcccgatgatcacgattcttttttggccaagctgcaagatctggctgactactacttcaagtcagtgatctcactcgaaaagtcagaagtgaaaaacactctcaacggatgtgaagtcctttcctaccgcaacagatttggactaccatatcgcgacgaaatcgctatgttagctcagttctatcacacaaaggctaggaatccgagccccgaaatcacgatggcacaagctattggctttgctttcgcatcatgcggcaaccacaaacgtgttctctccgtccttcaagacgtttatgaatactatgcacagcaaggtttcacacctaaccgtgccggattgtcacttgtcttcggcaactcacccgacctcgtaatccctcactacgacttatctcattttccaaccgagtatgagatcaaacagttcttaacgaacgccgtttatcacaatgcagaac

SEQ ID NO: 1263 - DNA, 1851 bp, Beet cryptic virus 1; identical to SEQ ID NO: 616
  source 1..1851: mol_type = other DNA

SEQ ID NO: 1264 - DNA, 1776 bp, Bondarzewia berkeleyi partitivirus 1
  source 1..1776: mol_type = other DNA
atgcaactccctttctttacgaaagttaaagagttcttttacaataagttcaatcctgaactttctgaatttcgtgaacactacgaattcaagcactgtctcaagtacattggtcgaaccactcctcgacacattcctactcgacatccctcacagtacgctgaatatcaagctgtcgtcaaagaagcaatcgaatatgtctatcctggttacgtttccgaacatgtcatcaatgactatcaccaccccgaagcgacctatgacctaattctctcaacgctcatcaaagccgacaagccaattcataatgttcctcaagacgaacatttccaactcggctgggctcttaccgctgacgctttccgtccgccccaaccccttcgccctgtccacctcgctgatatgcgattctaccgctggaactggtatccaaacgttgaagctcctttctctactgataagaagctcatcgctgccgtctcagaagctgcaaaagctggaatccttcccaatgcgaaaatgtcatttggcaacctcaaacatgttgtctttactcgtcttcgaacctttatgcaccaaatcaaacgcaatcagatcactgaccctgcccatcgttatcctgaagtcaccatccacgtcaaacccgctctaactggtactgataagtacaagatcagagttatcgctggagtatctaaacttcatgtcatcccgtccgcccaacgtttctggccactcttccgacactggatcgaatctaaagattcaccaatgctctggggctacgaaactattctcggaggcatgcagaagctacacctcgatatgaccatacccagacttatgtggaaaacatttgtcacgatcgactggcctgcctacgaccttcaaatcaattttgaagaacgccgccgctgctacgtcacgtatgaacaatattttgattttaacaatggttatatccccaccaaattctatcctgagtctaccgcagaccccgaccacttacaccgtgcctgggattggatcgtcgaagctacacgcaagatgccaatcgttttaccagacggatctatgtacgttatggccgatggttactggtttgtcttttccggactgttccagacccaatctgacgattcactcatcaaccatgcaagaattctcacaatcatgtcttctcttggattcgaagtaacttcttctgtccgattgaaagttcaaggtgacgactctctcacaaagctcgtcttctttgttccacccaatgagcatgacgcattcaaagaggcgttttctaagaaagcgctattttactttgatagcgatgtccgacctgaaaagtctaacattcacaacgacccacaaggcgtagaatgtttaggttatcagaacaacaacggatatcccgaacgcgacgaagtgaaattaattgctatgctgctccaccctcgaggtagccctactctcgacacactaatggctaaatgcgctggctttgcctacgctgactgttatcgtcacccacgtgtaatcgaagtgctacagcgaatctggaacaaacttcaagctcaaggtcactcccctggacttctcagaacacaacgagacgtcttactgcacggagaaaccaagtttgagatccccactgaccactttccttccatgaacgaagtgactcggcatttgagaacaccctatgttcgtaatcttatagacaaggaattctatttccctggctacacgcgaacgtctcatttccagtccttattctag

SEQ ID NO: 1265 - DNA, 1851 bp, Carrot cryptic virus; identical to SEQ ID NO: 626
  source 1..1851: mol_type = other DNA

SEQ ID NO: 1266 - DNA, 1866 bp, Cherry chlorotic rusty spot associated partitivirus
  source 1..1866: mol_type = other DNA
atggaccacctcacttcccttttcgagctttttgctatcacaccgaaaacacaaaacaatctacagtttgttgggatctaccacagacctccacactccgttcgagcaaacctccgcaatgttgaaaaacacaaaatcacagtcgctcacgccatgcacaagtacctttacccgcatgaaatcgactttgttatcaaccaaatgcgacgctcaaacgtcactgaagatgccatacttgctgactttttcgacaacaacgtcgaaccacttgaacctgttcttgacgaacacttcgaacgtggactctccgcaatgctggatgcttttcgccctccgcagaaatgcctgcctgcccacatctatgatgtgcagcaccactacccatacaaatggcaagtgaacgctgaagcccccttctccaccgattcctatttcttagcgaatcgaccaaccttccgcgcagtgtttgaacgactcgaatcgctctacacacacctcgcaaccgattggcaccgccgatacggaaacaaaaccgacaatgatgattttatgaatgatcatgtccctgcgaaatttggccctatgaaagaaacagtcttctcatggactcaccgatggcaccacgtcatcaaatccaacttcaccgacacagctggattgtctaaagactattacttcaaaaaccgatacatcttcccaatgcttcttcacacgaagacagcaattgtcaagaaagacgacccgaataagatgcgaaccatctggggctgttcaaagccttggatcatcgcagacaccatgctatggtgggaatacgtcgcgtacgctaagttacaacctggagccacaccaatgctctggagttacgaaaccttcacaggtggctggcttagactcaaccacgcacttttctcttcatacatacggcactcgtacatcacactcgactggaaacgcttcgataagaaagcgtatttctgcatcatcgacaaaattttcgatggcgttgaaacattcctcgactttgacaacggctacttgcctacgaaagattatcccgataccaaatcgacctggacacaaggacgttccacccgcatcaaacgcctgtttgactggacaaaagagaacttctaccatgcaccaatcgtcctacctaatggacacatgtacgtccgacaattcgctggaataccatccggcctattcatcactcaactgatcgattcctggtacaactacaccatgctcgcaaccatcctatccgcgatgggcttcgaccctcggtcctgtattattaaagtccaaggtgatgattcaatcatccgcctcagtgcactcatccctccggatgctcacgattcttttttaactaaggtccaagaactcgccgactactacttccaatcagtagtctccgtgaacaagtctgaagtacgtaacgagctcaacggatgcgaagttttatcgtaccgacacagacacggtttaccataccgcgacgaactagccatgctagctcaactgtatcacacgaaagcacgcaacccaagtcccgaaatcacaatggcacaatccatcggcttcgcctatgcatcgttcggaaatcatgaaagagtacgtctcgtactacatgatatctatgaatattacaagcatcaaggctacacacccaaccgagccggactcagcctcgtcttcggaaactctcccgacctcatgatcccgcactacacacttgatcactttcccactctcagggaaataaaaatgttcctgactaatgcaaattatgccaatgaagaaaccaactcacgaacgtggcctctcaaccactttctctctcttccttgtcatcgcacttag

SEQ ID NO: 1267 - DNA, 1764 bp, Chondrostereum purpureum cryptic virus 1
  source 1..1764: mol_type = other DNA
atgagatttactgaatatatcttatctggattcaaagtccttgactcttcaatggaccgtagtcgaaattaccaatttattggattcgacaaacctgaatcccaacctcctgccgatgctaccatgcatcacgcagtccaagctcccgtcaagcacgcgatgcgcaaaatattgctgcataacgaatttgttcacatcacgaccaagttcaagcgttctactatcgacgactcaagtatcacggaagccttcttcaaaggagaccttccttatcacaaagtaccaaaagatggttcttatcaacgtgcactcgctgctactatgcaagtattcgcacctcaagttcctatcaaaccagtacattactgtgacctccgatactacccttggaaactccgtccgtccgctgaactaccgttcactgacgatccggcattgttcaaacgtgtccaacacgccgccgaacgaaaacagatacctgataaaagaatgtcatttggcaatctttacaatcacatttttgaatatctgcgacccatcattcattatattaagaatggtccgtttcaccttcccttcaaaacatcttggcctcaagatgactatctaacacccatgcgctcacacgcacgttccgcaatccaacctatctctgaccctaacaaagtccgatttgtatatggataccccaaagttggcattttccctcaagcaatgtttttctggcccttatttgtgtattatcacattacaggtcaatctccacttctgtggggttacgaaaccatgactggtggctggtacagactcaatcacgagctccgttccacacctggcatatccggttctatactcgaactcgactggcaaggattcgacatccacgccttgttcgaagtattcgacgacattaagaacttatcttggtcattttttgattgtagccacggctatcaaccaactaaagactaccaaggcacttcttgcgatcccgatcgcctgaaaaacctttgggaatggatatggttctcaatcaagtacactcctattagactgcccgatggccgtctattccgccgttcttggcgaggtgtaccctctggactcttcatcactcagtggctcgactccgtttacaattgtatcatgatatttactatcctagacgcaatgggtttcgaaatcacaagtgacctaataatcaaagtattaggcgacgactcgctcacgcgattacgtcttcttataccgtacgatcagcatgaagcatttaccatacgtttcaagcatcttgcgcaatactactttgacgctgtcctatccgacaagaaatctcgcatccacaacaccctcaatggtgttaaatgtttaggttaccgcaataacaacggtttacctgtccgcgatcgcgaatctcttctcaccgcactgctatacccgaaagcacgccgacctacctttgagcaactcaaggctagatgtatcggtattgcttacgcctcagccggaaacgatcctaccactctcgaagtgtgtaaagacgtttacgactatcttgatgctaaaggcatcaaagcagaccctgccggtctcgccgacctattcgacccgaatctaggcctcgacatcgacatcacgttcttcccgaacattctcacgattcagagaagtcttctcatcttacgagactcccgcgaacaagcacatcgaatgtggccaacatcacatttcctgtcgccaattcctggactcgttgacatctga

SEQ ID NO: 1268 - DNA, 1746 bp, Hanko alphapartitivirus 3
  source 1..1746: mol_type = other DNA
atggaaaacctgctccccaaatcgtcctcaaattcctctaatttagatcttgtgcgtcatgatccgctccacggctcaatccccaagtttctcaaggaacataacgacttctacttcatcggacaaacccttgtccttagtgccatcgctacctatgctgccctcttgccccctggttcttacgaccggatcaagaactttcgccgctcctatgccggtgctgaagaagctgaagccttctttcaacgctatgacgttgaacctttcaccattgtgaaagacgacttgtaccttcaagctctagacatcgtaaccgaatggttccgacctaagtctcccatacacccagtccattttctggatctccacatgtatccctggaacttatctactagtgctgaacgtccattctccaccaacaacgatttaaaatctggtctcatccacctcaaaatagctggcctcattgataatgctcgtatgtcatttcacaatctctatgatcatatcttcacctactgtagaacctacacccaccgagttaaagatggcctcaaaccccctcttcacccgattactctacatatcaagcccgctctcgtcgatgaacattcagatgacaaagttcgtactatcttcggagtccctaagcccataatcttcctcgaagctatgtttctttggcccctctactctacttactttaaagagcaaacctctcctctactctggaactatgaaaccctccaaggtggctggtcccgtctcaacgacgaatggatctccaacttccgctcatacaagcctgtctttaatttagactggtctgaatttgacatgcgcgtctactactctatgtggcaagattgccttgatagaatcaagacctacttctgcttctgcggtcgctaccaccccacccacactcatcccagagctcacacctcacctaatcgtctccacaacatctgggactaccttcaacacgcttattttaacacaatggccgtatccaccactggtaacgaatacaaacgccgcttcgctggcatgccctctggcatattcggaactcagttttacgactcattctataactccgtgatggttgtcaccactctcctcgctctcgaccaccctgtcgatcccaaccactttatcaaagtgatgggcgatgatgttatctttggtactctgtcgaacatgactgccgctgaatcagctgcttttcttgactcgttcgccattgaagccaaccgacgctttaactccaagctcagccccactaagtctggcgtctcccctactatccaaggtgcctcaatcctcagttacaccaactggaacggctaccctaaaagagaccctgtccagctactcgctcagctcctccaccccaagtcgctccgtgatactccccctcgtctcatggctcgtgctatcggcatctactacgctagtgctggtgaccaccgacttcgcccaatctgtgaacaagtttacagtgaactcaaatttcaaggctactcccccaaccaggctgccttcgacaaactatttgatccccgctcactcggactcgaacacatcgatttatcccacttcccttcaaagaccgaagttatctctcgtctgtcctcaccctcgaaaagaaaccccgatcttcaagccatttactggcccctaacccacttctcctctgaagccggatttgacattcagtgtcactctccgcgctccgaatag

SEQ ID NO: 1269 - DNA, 2121 bp, Helicobasidium mompa partitivirus V70
  source 1..2121: mol_type = other DNA
atgttcaacacagtccgcaactaccttgctgagaagacaaacaatcttctgctccaaatgcaagctttccagcgctctcaatcacatccagatgatcctgacctactcgtcaacgattctgacctcagacgtcatgaacaatccttccgcgaccatccaactgaactacgcagagtcaaagaataccaacaaaattacgatcaaatcgtatcttcgctcgaccaaaagaacgctctaaaagaccaacactttgagtttttctcaccttccgatccgacttccttccccgccgatcgccttcctgcacctggaattcaaatcctccccctccgctatcattccactaatcctgtaatcgctaccaacctcgttcctgaaactggcttccctctccatccgctgattcactatctcgtatatcgtaagtaccctaggtacattccttatgtcgaaaaatatgtccgcccccttggtacaacagacgccaccttttctgatttcaaccgtgaacaagtaaagatcgctcctctcgatcctgagcgcaaacgcactgtactcactctatgcaagcactttctcgcatgtgtcccctatcttccaattcattttgttgactttatgtacgcaaaactcccactccacactggaaccggatacttcaatcgcttttcatatgacgcacaagctcacgcttctttcgcacatcctgaacaataccatgatcgccatacatctaaaggctattatattaacacgactatgcaatacgctcgaactatcgttcaccgcctaaagcaattcgctcttccctttaatcctaaagatttcgactcttcgtccatcttctcacgtatgcgcttctttttcctcactcgtcccactatgctattcactcgcaaccatatttctgaccgagacggtaatctaaaacaacgccctgtttacgccgtcgatgaccttttcctcatcctcgaagttatgcttaccttccctcttctcgtaatggctcgcctccctgaatgctgcatcatgtacggcctcgagactattcgtggctccaaccactggattgattcaaccgcaaaacggttccgatcctattttacaatcgactggtcccaatatgatcaacgtttaccccgctgtatcactgacctctattacaccgatttcctcgaatctctcattattatcaactttggctaccaaccaactgctgactatgccgactatcccgacctcactcccgatatgatgttcacacgtatgactaatctcctccactttctccacacatggtacaacaatatggtttacgtcactgctgacggattcgcctacattcgcaaattctgcggtgtcccctctggcttattcaacacgcaatacctcgactcatttggcaacctctatctcattattgatggtatgctcgaatttggtatttcaatcgacgaaatcacatctgtcctcctactaattatgggtgatgataactccggctttacgcactgggaacttcttcgtctcacgcacttcttagatttctttgaaaactatgcactcgtccgctacaatatggttctctctaagtccaaatctgttattactcgcttccgtaatcgtatcgaaacactctcttactccgctaattttggaatgcccacacgtccactcggcaaacttgtcgcccagctctgctacccagaacatggtgtcatagataagtacatgtcgtcacgcgctattggcattgcctacgctgccgctggcatggacccctccttccatcgcttttgtgaagacgtttatctaacgttccttccctacgctgcccctattgattcatcttctttagaacgtattattaagcacttacctggtcaattcaaaatgctcgacgcatatactgaccacgttaatttagagtctttcccttcaattcatgaagtacgcctcaagtactccaaatggcaaggtcctctcgacctcgactccaaatggaatcctgcgcactttacgtctccacccaaccttccaccccaaggtttcttcactatcgaagactggcgcacccttcacaacatcccaaggccacccgtcaccgactactttccgtga

SEQ ID NO: 1270 - DNA, 1617 bp, Helicobasidium mompa partitivirus V70
  source 1..1617: mol_type = other DNA
atgtctgctttctggaatctcgaattccacggaatggatccgtttgctccgaacataccccagttcttgctctcaccaagccagcactatgtttcaaaccatgcaatcatcaaggatcaatttcactatcaagctctagacatcgttaccgaatggttccgcccccctcaccccattcaccccgtacactataccgacttacgttggtacccctggaaactatccatgagtgctgaacgcccgttcacattcatgcaaagcgccaaggattacgttaaacaaagatatgaagctggtctcatccccaatcgcagtctcaaatttggaaatctgtatacaccgatcttcgaatactgccgacactaccatcacaatgtcaagaatggccgctcgccaatcttagaccttatcacgttacacgttaaacctgcccttgtcctagtctcttcaggaatagacaaagtacgcaccgtttttggagtcccgaaatacctcattttcgctgaagccatgttcttttggcccctcttctccatctacttcacgtcagctaacacccctctcctttggaattacgaatctctaaatggtggttggcaccgattagactccgagtatcacgctcgctacacaatgtactccccgatcttcaacttagattggtcagagttcgacatgcgcgtttacttcaccgtttggtccgacatcatcgaccgagtctcaacctacttctgtttctgtggccgctactgccccacactccccgtcctcgacgaagaaactggtacccaactccaccctccgtattccgaaccgtttaccaaccctcaaaggttgcgcaatctctggttctggattagatatgcctacttcaatatggctgccgtcactacgacaggcaaaattttcaagcgttcattcgctggaatgccatctggtatattctgcacccagttctacgactccttctacaatgctgtgattatcgtcacttgcttactagcccttggctacgaagtgagacacgaccatctcatcaagctcatgggagacgacgcactctttggtctgttggaaagtatcccgatcgaacactggtctgaattcttagatgccctcgctgccgaggcactcttccgattcaatgctaaactcagtgctacgaaatgtggatacacccgcaccatccaaggtgcgactgtcctttcatacacgaattggaatggatggcctgtccgctctgctgaagacgtactcgcccacctactacaccccaaatcgttgaaggatagtgcccctcgcctgatggccagatccatcggactctactacgccagtggagccaatccccggatccgacctatctgcgaacacattttctcgacactgaagcatcaaggcttcaccgtccggaaagttaatctcgctgaattcatggaccctcgtggtctaggaacttacaatatcgaggttgacaacttcccttccccactcgaagcgatgtgccgactctctcgcccctctaccagatctgaagaaattcaatctcaatactgggaccgatcgcacttcgaattcgacgccggtcaagtccggaactgccaaagctcattctga

SEQ ID NO: 1271 - DNA, 1866 bp, Heterobasidion partitivirus 1
  source 1..1866: mol_type = other DNA
atggattaccttaccggtttattctcacgcgttctccacatctctcgcaaagttaccaacttcgagttcgctggcacctaccactaccaaccttcaataccacaagtaaatgaagtcgccaccgaaaaccacaaacgcaccttacgtcacagtttccgaacttacctcacatctgacgagtacgacaagatcgtcaacggctacaaacggaccaatcttgacccatcgaccatcaccgaagatttcttctccggcgacatagaggatcatcccgagccaaccgactttaaaagtcaactctcaatcgagtacggactgcaatgcatgatcgacgctttcaagccacctgcccccgcacgtgtctgtcatctctacgatgtacaatggcactaccctttcaaatggcaagtaaatgctgaagcacctttctccaccgagaaatacttcctcgaccttcgcaagaagtttggcgatttctttgacccagtcacaaaactctggaccaagtacgtcaaccctctcgacgccctcagacgttacggacacacacctcccgccgacacactgaaccaagtcactccaccaaagtttggcttcatgaagaacctcattttttcattcgttcattcctggcaacatgtcatcaaatctcgcttcacttcgaatgctggcatcacacactctaacttcctccgtcaacgttttctctttcctatgctactacacatcaagacagcaatcgtatctttcgatgctcccaacaaactcagatctatctggggtgtttccaaactctggatcatctccgaagccatgatctactgggaatacatcgcctggatcaagctgaaccctggctctacaccaatgctatggggttacgaaaccttcaccggtggatggttccgcctttggcgcgaccttcacacacccggagaagatgtaacctacatcaccatagactggtctcgctttgacaagcgcgcctacttctggctaatccgcaagatattcatccgaacacgatgcttccttgacttcaccaatggatatgtctcaaccaaagactacccgacaagtccgaccgaccccgacaagctacaagctctctgggaatggacaatcgaggcattctttgacagtccaatcgtcctccctgacggttcgatgttcaaacgactattcgctggcatcccttctggcctattcatcactcaactgatggactcatggtacaattacactatgttagctgctatcctgcactacatgggctacgacccccgtcgatgtatcatcaaagtacaaggcgacgattcaatcattcgtctttacatccagataccccttcatgagcatgatcttttcctacttcgaatgcaagaagtttcagaccatctttttggagcgaagatttccttcgagaaatccgaacttcgcaacagcctaattggctccgaagtcctaagctaccgcaacatccaaggtctaccttaccgtgacctgatcaagatgcttgctcagttttaccacaccaaagcaaaggacccaacacctgaaatcacaatggcgcaagccatcgggttcgcctacgcagcctgcggcaacgattttcgtatccacgaacttcttcgctcagtctacgattactacaaggcccaaggtttcacacctaaccctgctggattaacagttgtttttggagacagtcccgaccgaccggactatccaatatcgctggacgagttcccatctcaaatggacgttcaacgtttcttcctctcaacagattatcgcaatgccgatcaagaaaacagaacctggccatcaagccacttcttgtacgcaccttgctctcgtatctag

SEQ ID NO: 1272 - DNA, 1758 bp, Heterobasidion partitivirus 12
  source 1..1758: mol_type = other DNA
atgcaaaccttactctctgctgtctactccatacgcgatgccatatttggcaaaacgctgtccgaacctcatggcttgaacgtcaacttccacttcgatggatacgttaccgacgaaatcaagacctcaatcccacctcgggttgaaatgtggtactctgactaccaaaagttcctcaaccctatcattagggcgaacttcactggtgctgaagctgacaaaatcatcaacggctaccaccacccggtggcaacgatcccgtttatggtcgaaaacctcaagaaaggagacctctctgatcatcctgtcccacatgatgaacactacctccgtgcccgtaaaatggctgctgatgctttccgacctccgcgaccgatccgacccgttcatttcgcagacttgcgcttttacaactggaattggcaccctaatgttgaagaaccttactactccaacaagcgtgctcaagaatatgtccaggctgcccacaccttaggcctcactcccgacgcccgtatgtcattcggaaatctccgcgactacgtatttatggacacccgacactatcttcaccagatcaaacgcaatgaaatctcaaatcccaagacactatggcccctcatgaaaatacatgtcaaacctgcgcttactggaaccgacgaacaaaagattcgcgtcatttatggcgtgagcaaacgtcacgttctaccgcaatgcatgttcttctggcctttgttcagacattacatcgagaacgacactgacccattactatggggctttgaaacgatcctcggcggcatgatgaaactcaactctctcatgcatcgtctgtacttccaaacattcgttactgttgactggtctggattcgaccttcgctcacttttctctatacaacgagagatcttcgacgactggcgaacctacttcgacttctccaatggctacattcccacagtttggtatcctaactcaactgctgaccctattcagcttgaacgtctctggaattggcaacgcgacgcatgctttaacatgccgttcgtcatgcccgacaaatccgtataccggaggctcttccgcgctattccgtccggactgttcgtgactcagttcctcgactcgcactacaactacatcatgctcttgaccatcctctctgctatgggcttcgatatcacaatcgaacgcatccgtatcttagttcaaggcgacgatagtttgaagaaccttatcttcttcatccctgcgaatcaacatgacaacttcaaggccgaatttcaacgcttggctacctattactttgaccatgttgcccgtcctgagaaaactgaaatctacaactcaccacaaggtgttaccgtcctcggttacactaacaacaacggtttcccaactcgcgatcccatcaaattgatggcccaactatatcatccacgacaagttggtgaacgctggaaatccgtactgatggctaaatgtgctggctttgcatatgctagtgcctacaactatcccaaggtgaccgccactctaaagactgtctactacaaattggctgcaaaaggcttctcccccgctgccttacgcactcaacgtgacatcgtcctatttggcgaagctaaatttcaggtccctaccgatcacttccctacagctgaagaagttcagcgacatctacgtgtgccttataagcgcacagaagaagactccgagtcttactttccgatgaagcacttcctcgacttcgcgtga

SEQ ID NO: 1273 - DNA, 1746 bp, Heterobasidion partitivirus 13
  source 1..1746: mol_type = other DNA
atgctcccgatcatctcacaggtcacagactacgtatatcgtaagtttatcaaacctgctccgacccaattcaagaacaactacctgttccagaactggctctcccctctcacgacccctcatcgtgacgcgacaaagtatgccgaataccaagcgtacttagagaaacatatccgctcaaacctactcggttcagacgctgaatatgtcatcaagcgattccaccaccctattgcgaccattgactctgtcaacgaaacccttcaacgtggcgatctcccggaccatcccgtccctaaagatgaacactactaccgtgctctcactgaaaccacaaaacgtttcgcccccccgcaactaatccgaccgattcacttcgccgaccttcgttactacgaatggaactggcacccgaacgtcgaggaaccgtatgtctcgaactcccagctgaaaaccgccgtccaagacgcgtatcacgctggcctccttgaagatggaagaatgtcttttggcaacctaaagaaccacgtgttcatggatgtcagacacttccttcatcgtattaagcgtggacagatctccgacccacacacgttgtggccgctgatcaacatgcatgtcaaaccagctttgactgaaaccgacacaacgaaaattcgtttagtgtttggtgtctccaagcgacatgtcctccctcgcgcgatgttcttctggcccctcttccgctactatctcgacaaccgagacaagtctcccatgctatggggatttgaaactatcctaggtggaatgatgctgctcaactccgagatgctcctctcccgactctactaccagacatttgtcaccgtcgactggtcaggcttcgatctacgatcgttgttctctatcattcgcgaagacatcttccctgcctggcgcacatatttcgacttcaacaatggctacatgccaaccaaattctacaagtcttcaaccgctgaccctgatcagctcgaaagattatggaactggactaacgaagccgtcttcaaaatgcctttccgaactatggatggcgctacctttttacgactatttagaggtatcccttccggtctatttgaaactcagtttcttgactcgttctacaacatgctcatgatcttaaccattcttgatgccatgggattcgacatttcaaccatatatataagagtccaaggcgacgatagcctacttctactaaccttcttccttcctgcggaccaacacgcagagttcaaggcccagttcgaagcgctcgctgcctactacttcgatcacgtcgcaagacaagacaagaccgacatctccaacacgtctcaaaacgtcgccgttcttggctattctaacgacaatggctacccaagccgcgattggcgaaaactactcgctcaattgtttcatcctcgaagccaacgcccaacactctcacttctgaaagctcgttgctgtggaattcaatacgcatctatgtataagtatcctcaagtcactaacgtggctaaagctactttcaaccaactagatagcgaaggtgttcaacccgtgaagctcgccgctcaacgcgatgtaatccttcactcacacaaggacttctacgtccctaccgaccacttccccactctcaatgaagttaccagatatctccgcatcccttacacaaggactgaagctgattctgagacttactaccctatgtctcattttctctcacagttttaa

SEQ ID NO: 1274 - DNA, 1746 bp, Heterobasidion partitivirus 15
  source 1..1746: mol_type = other DNA
atgttctctctactcacctggctgtcaaccaagttcaatgctcttttcgattctgtctattcgacacgtttcgagcacaacttccgcttcctctacaaggctgctcccctgaccacgcctcacagagatgaaacaaaatacgctgaataccaagcatacgtcaagtctactcttgaccatgttctcctcggcccggacgctcatcacatcgttaacggatatcaccaccccattgctacacttgatgctgtaatcaacacattcaagaaaggcgacttaccagatcacaaaatacccaaggacctccactattactctgctctcctcgaaaccactaaacgtttcgcacctcctcagaaattacgtcctgtacactttgccgatctccgcttttacaaatggaactggcatcccaacgttgaagagcccttccgctccgaagctgagctacaacaagctgttgaagctgcttaccacgctggactacttccagatggacgcatgtcttttggcaacttaaagaacgtcgtttttatacgagttcgcgaatggctgcatcaaatcaaacgtgcacaaatcacgaatccaaacacgctctacccgctcatcaatattcacgttaaacctgccctcaccacacctgatgaaaccaagatccgcgtcgtttacggcgtctcaaagctccatgtcctacctgaagctatgttcttttggcccctcttcagacattatctcgacaatcgcaaagaatcacctctcctttggggattcgaaacaattctcggcggcatggctgtcttacacaatatgatgaccattccaagactatacttccagacatttgtcatggttgattggtccggattcgaccttcgctcactttttgagccaatccgcactgacgtctttcccgcttggcgaacttatttcgatttcaacaatggatacatacctacccgattctaccgcacttcaaaagccgaccctgagcacctcaaacgcttatgggaatggactcgcgaagcctgcctccgcatgcctcaccgcatgatggatggatctgtctacgaacgtctctttcgctgcatcccttctggtttgtttacgacccaatttctcgactcattctacaatatgcttatgatcttgactatcttatccgctatgggtatcgacatctcaactgtcgttatccgagtacaaggtgacgatagcttaattatgttacagttcttccttcccgctaaccagcatgaagaattcaaagcacgatttcaagctctggcaacttactacttcgatcacatcgctcgtcctgagaagactgacatctccaactcccctgaaggtgttaatgtcctcggttacacgaacgagaacggatacccaatccgtgactggcgcaagttacttgcacagttgtaccacccacgaagtcaacgcccaactctcgagttactcaaagctcgtgtttgcggaattcaatacgcaagcatgtaccgctaccctcaagttacagaagtgtgtcaaacactctggaaccgactcgaagctgacggaatcaaggctctgaatctagccgcgcaacgcgatgttgttctacactcgcatgccgacttcttcatccctacggatcacttccccactctcaatgaagtgaccaaatggttacgcgttccttatcaacggacggctgaagaccgcgaagaatatttccctctttcgcacttcctgtcttacttttga

SEQ ID NO: 1275 - DNA, 637 bp, Heterobasidion partitivirus 20
  source 1..637: mol_type = other DNA
ggacgagatcctcaagaagctaacgctctcaccgacctcaccaactccgctatcgatcacgctctcgccaaattcctcacacccgaagaatgcgacaagatcatcaacggataccgccgctcaccctggaacgaagatgcccttaaacacgacatctcgaccctggattccgaagaacaccatgtcgacaaagatgaacactactggaacgctatcaagcatgtccacaagctcattaaacctgaagtacccctccaggctgtccacttctccgacctccgtcactacaaatggcgtctgtctacgaacattggcgctcccttcgcctcctcgccgaaatggaaaaattacgtgaaagcgaaattcgaatacttccgatctggaaaacaattcgagaacatcgctgatcgtgacctgttcaccgaagcacaccacggctctcaatctcttgagataaccgacgctcggatgacaaaacacaacctctacacagaggctttcttcatcactcgcaagaatatccactacatcaaagaaggtaaaacctccgatgactatggcaacgacctcaaatactggaacaccgcattcgctcgacaacacctcgtcgaaacagatgacccagataaagtccgcc

SEQ ID NO: 1276 - DNA, 1779 bp, Heterobasidion partitivirus 20
  source 1..1779: mol_type = other DNA
atgatgaactccactatcgtcggtcgcttccctcacttgggaacgaaaattcacggtacaaaggatatcaatccttactactgcgaagtcgtcgatcacgcgctcaagcgtttcctcacacctgaggagtcagacaaagtcattaatggcttccgtcgctctccctggaactctgctgccctgcagaaggatcttgaaaagctcaactcccctgaacatgtcgttatcaaagacgaacattatcagaaggctctagctcacacagctaaacttttcgctccaaaggaaaagctcaaacccgttcattttgccgacctccggcactatccatgggaattatctactaacgtaggcgctcccttcaattcttcgaagtcctggcaagcttacctcaaacacaagctctaccccgacaaccctattcctcccgaatacgaagaaaagttcaccgatttctctcataaacgcgatttattcgctgaagctcacaatatgcaaactcttcctccaacagatgaacgcatgactaagcacaatctttatacagaaatcttttatgttaaccgcaagcacatccatgacatcaaaaatggtaagactcatacccaatcgggtcatgactaccgttattggcacaccgccttcgctcgacaacacttagtcgaagcagacgatgaagacaaggttcgcctcgttttcggtgccccgtctctactgctaatggcagaacttatgttcttatggcctatccaagcctctctcctctctcgaggtgaagactctccaatgctttggggttacgaaaccctacttggtggctggtcccgcctatatgcctgggcttaccgcacaatcgtgcgctttgcctcagtattcctccttgactggagcggattcgaccgttatgcaagacataccgtcatccgagacattcactcacatgttatgcgccctatgttcgatttctctaatggttattggcctacacacaaaaaccaagaaaccactgccgacccccaacggcttgaaaacctctggaactggatgaccgattcaatcgtcaccactcctcttatgctcgaagatggaactcttatccgtttcaatcactcaggtattttctcaggttactttcaaactcagattctcgactctatgtacaactcagttatgatattcaccattctttcaaaaatgggatttgacctcgactctgtcgctgtcaagatacaaggcgatgattcacttcttctctttctctatctatttatagccttacttgcccaatccttcctcagtatgttctcacactatgcatctctttattttggtgccgtgatgtcagaaaagaaatctaagcttcttccttccctcgaagacgccgaagttcttaaataccagaaccattctagtatgccgtatcgcgacgaaatcactctcctcgcaatgctccgacaccccgaacgctcctcctctctctcttctctcaaagctcgagtcattggaatagcatacgcagactgcggacaacacccccgtgtttttcaaatttgcgaagatatttataattttctttcgcaggatgaaaacatcaaggttgacccacatggtctacctggtggtttaagattccgtgaccgttacgtccccggagaatggaaaattgatctttcccatttccctacctggttcgaaactgtccgtcatcttcaggatcccgcccgccaactcttaacagagaaacactggccgcgaaagcactttatcggtactccgtaa

SEQ ID NO: 1277 - DNA, 1758 bp, Heterobasidion partitivirus 3
  source 1..1758: mol_type = other DNA
atgaaaatcttttcaactctgtactcgtcctttgcctcattcgcaaaatggacaggtctcaccgatcctcatggttttgaacacaacttctacttcaccggctacgccgacaagaagatcaaagtgtccattaaccctaggtttcaagaagtatacgacgactaccaatcgtacgtaggcaaatttattgacaaacatcttcctggccacatggctcaaaagatcaaatttggctaccatcatcctgtcgcgtccctaccattcatgataaccaatctcaagaaaggtgacttgcctgaccatcccgtcccgcatgaccagcattacactgcagctcgcaaagcagcagctgatgcattccgaccgccccgtcttgtccgtccagttcacttcgctgacctgcgatactacaaatggaattggcaccctaacgtcgaagaaccttattactcagatcctaagctacaacaatacgtcgaacattgctatgcactcggcctaattgatgacgctcgcctatcttttggcaatcttaaggatttcgtcttcatggatacccgccactacctccatctcatcaagaacggatcaattacagacaacaaccaactctggcccataatgaaaatacacgtcaaacctgctctcactgaaccgaccgaaactaaaattcgtgtcatatacggagttagcaaacgacacattcttgcacaagcaatgtttttctggcctttgttccgttactacatcgaagaacacacttcccctctcctctggggcaatgaaaccttcaccggtggtatgcttaaaatccacaatctcatcagcgtacctcgtctctactctcaaacttatctcacggtagactggtccggattcgacctccgatcactcttcacgatacaacgagaaatctttgatgattggcgaacctacttcgactttacagcctacatccctaccaggacttatcctgactccaagaccgatcctatccgcatggaacgtctttggaattggcaacgtgacgcttgctttaagatgcctttcgtcctccctgaccgaaccacttatgctcgcctgttccgttcaatcccatctggcttattcgtaacgcaattcctcgactctcattacaatctgattatgatctacaccatcctttcagctatgggtttcgatatcaccaatctcatgatcctcgtccaaggagatgactctctcattcatttgaagttcttccttcccgccgatcaacatgatgcattcaaagctgagttcgaacgactcgcgaagtactacttcgaccatatcgctcgaccagagaaaacgcacgtcaccaactctcccaacgaagttgaagtgctaggctacaccaacaacaacggttatccttctcgcgacatgaccaaactagtcgcccagctgtaccatcctcgaaacgtcgacaagacgtcatggaaatctcttctcatggctaaagtctgcggcttcgcatacgcatcctgctatcaagattcgcaagtgatagacctcctacgctccatttacaacaacctggcttccaaaggcttcaagcctaagtccggccgcgtgatgcgagatattatcttattcggagaatccgaatttgaggtccccactgatcatttcccaactctcaacgatgtgaccaagtatttcagacgtccttacgtccgcactcaacgcgacgctgactcttacttcccctcttggcatttcaatgatgtgttttga

SEQ ID NO: 1278 - DNA, 1824 bp, Hygrophorus penarioides partitivirus 1
  source 1..1824: mol_type = other DNA
atgaataacttagtcatggtgatagactatccctattctctaccaaccaaggaaagatacaatcccaagcgaaaagcgatggatatgacttaccgaaatgattggttaagaaacaggattttaaaattctacaccgaagccgaggttgaacaagttctaacgaacagacgatctgactactcagacaacgcgctaatcgccgatttctttcgagccgatcagccctatcatccaattcctattgacgatcacgtcgaaaaggctgttgaatgggtcaccgagaaattcagaccaaacagagttctacaccccgttagcttccctgacttacgttattatcccttcactctcaatgtgagcgccgaagctccatggactagcaataactttaccttccgaccaacggatagaaatgttgacgcagagtcccagcttcctagactggctgatatcgaacgcgaaatcatgggcgtaggaaatgaaacaccactaacctacctccggaaacgccaacgagccggatttagcaaagacgctaaactaacttaccacaatctctactctcagatttttgtctacaataggcaacgagtacacgagattggtattggagcgaaacagttctggaaaggcataacacctttaccttactactggaacaccattcacgcacgatcccacgtcgtagcatcagatgaacctgacaaaattagatcggtttttggagcaacaaagctgctaacccaaatcgagcttatgtttatctggccattacaggcaagctacatgaacaacaaagacgtcggaagaatgttgtggggaagagaaatcatccgaggaggatggaggaaactttttaacgaaatacatcagactggtccacacaatacctttttgtcgacagactggagtcaattcgatggaagattacttcaccaactcatacgtatggtccaccgcatctggagacgatactttgatttttcaaaatatgaaccgacttcatactaccctcattccaccccgaagaacaaacgaaaactcgaacggctatggaaatggatgacagaagcgattctcaacacaccgatacttttacctaacggtcaactatactattggaaattcaatggatttggatctggctttcaacaaactcagctcttggattcattttgtaatgccatcatgttattgacttgcctctcggcacttggggtaaatatcgattcaccactattttgggcccgcttccagggagacgattcacttacggctttccttgaacgcatgttcactatatatggtaaacacttccttgaccaactcgcggaagcaggagaacactattataacgcaaaacttagtgttaagaagacccagatctctgacagacttacgaatgtaagcgtgcttagctatttcaatcaacttggaatgccttatcgcacagatgaagatctccttcgtcacctgtacttcccagaaagagaccaagacttcgaacgtcttgcagcctcagcggtcggactagcatatgcaaattgcggagtaagcactcgctttcatcgcctttgtgaatatattttcaacaagctagtacatgagaaaggattcaagccaaactacaaagcaattctgtggatggtacgatcacatgtctttccctcaatcgatgatttgaaagaagcacctttcccaacaatcgagcaccttcaagcaatggtgttcacccacacatctcgcactcagcgtgagaataacagacagtggcctaatcccaatggcaaagcgaatggattctggttcctactgaatgtataa

SEQ ID NO: 1279 - DNA, 1383 bp, Kuusamo alphapartitivirus
  source 1..1383: mol_type = other DNA
atgtacattaaagcattatttcaattaaagaatgcaatcaatgtcaatgaaaagctaaaaacagttcatttcactggcacacgtatgtatgatttaaacaaatctggatccgctgaattaccctacactgaatgtccactcttcaagaagcatgtctctaaaagatttgctaaaggagaaatagttaacgaagcgttaactaaaggaaatggagaaaacttcattttattcaaagaaaggtgtaagttacatcaaataaaagatcagatccttccaaaggagaagctgttgcatgatataagaatgcacgctagatcccacttgacaacaagtgataaggaagataaagtacgagcagtatatggagttccatgtacagtaatctacgccgaaataatgattttctggccattactagctcatttaaagtctcaggaaaacggttttatcgcatggggatatgaaacctttagaggaggtctcgaaaaattgaggcgtgaagttcatgattatgatattcacctatcacttgatttttcaactttcgataaactaatacctttctggttaatagatgatatctatcagatatttatgagtttatacgaatttggaccttattacgaagacgatcccgactaccccgacccatcaactgatcccaagagaattaaaaatatctgggaattcgtgctatttgctgtcaagcattctatttatagagcaccggacggaagtaggtactcaaggaggcatagcggcttcccatctggattgctacaaacacagctactaggaagttgctgtaattatgtaatgattgttactgccttgtatacaattggcttttctgaaaatgatttttcaataaaagttttaggcgatgattcatgtatatcaattaggactcaaaaaccacctaaagatatactcaatgaaatatcagccatttcaaagcagttatttaatgctaaaattaatgttgccaaaagcacttattctgtaggaacctcaaatctgcaattcttatcatataaactcaacaatggggctgtgattcgagttaacgatgaccttctaggtaaacttgtttaccctgaaaaggctcactttacacgagaaactacaaaatcaagagctctaggaatattagtttcaaacttagggtataatgagtacgttcatataatatgttgtgaaataatcaacaaattagcggacgaggcttattctcttagaggattaaactggtatgatcaaagaaaacttgaatttattcaaaaatttatcaaaaaccaaccatctaggcatgaattatttgtcatggcactaacaccacaaccgaatataatagacgaaaatttcgataaatacatcagatga

SEQ ID NO: 1280 - DNA, 1761 bp, Medicago sativa alphapartitivirus 1
  source 1..1761: mol_type = other DNA
atgaagaatatcgagataatcggttacaagccctctttggctaaacctattcgtggtaatgttgatcctaactcaaacattaattacggtaatatcgtcgattatgctttaagaaaatacctcactaatgaggagtttactatcgtcacacgtggctatcgtcgctcacaatgggctgaagacagtcttaaaagtgatttagataaactagattcagactactttcccgtgctcaaagatacccattattataatgctatcgaacacactcggaaattatttaaacctgattctttacttaagcctatacatttttctgacttgcgccattacccatggcagttatctactaatatcggtgccccttttgctactagtaaaagttggaacgaatacgtaatacagaaattcgatgaaggttttaccaaatcttattatcgagacttatttcgtgaagcccacggagaaagtctacttcctgagatgattgatcgtcgtatgacgaaacgcaatctatacaatgaaatgttctttattaaccgcacaaatatccacttaattaaagatggacacactactaactcaagtggtcatgatctcaaatattggaacacagcatttgctcgacagcatctagttgaatcccatgatgaagataagatccgcttagtattcggtgctccttccacatttttgatggctgaactgacgtttatctggcctttacagacaagcttactataccaaggagaacgttctcctatgctatggggctatgaaaccactactggtggttggtctagactatataaatgggcctcctctaggatgcctaggtatgattttgttgctactctcgactggaaacggtttgatagagacgctagacatactgttatctctgatatacatcaacttgttatgagatcatattttgatttcaataatggatatcatcctacaatccactaccctgactccaccggagccaaccctcaaagaattgagaacctatggaattggatgactgacgcaactttaacgattccgctaatgttgcctgacggtaagatacttcgatttaaacattctggtatatactctggatacttccagacacaaatactagattcgatgtacaattgtgttatgatcttcactgttctatctagaatggggtttgatcttgaaagagttgaaattaaagtacaaggagatgattccattttcttaatgtgctatcctttcattactcttcaaaatacgtttctacagatgttcgctcactatgcgaaaatttactttggatcaactttaaatattgataaaagtgaaatattacctagccttgaaaacgctgaggtattgaaatatcgcaaccatggtactatgccatatcgtgaagaactacaactattagctatgttgagacaccctgaaaggactgtctcgttaccatcgctgatggctcgatccatcggcattgcttatgctaactgtggattccactctcgtgtctaccaaatttgcgaggatatctataactttctgaaagccggaggctatagccctgacccgcatggtttaccaggtagtctacgctataggcaaaattacgttccaggatattctgaagttgacattagtcacttccctagttattttgaaactgtccgccttctccaagagccaactcgtgacttagtttccgaaaagcattggccattaaaacactttatcggtatccccggaaagtcttaa

SEQ ID NO: 1281 - DNA, 1761 bp, Medicago sativa alphapartitivirus 2
  source 1..1761: mol_type = other DNA
atgcgaaacacaaccgttattgggcacaagcccagtcttgctaggcctctttatggaaatccagatgctggatccaatcctgcctacgctgatacagttgatcacgcactacgtcgatatttaactcctgaagaattcaacagagttgttaatggctatcgccgctccccatggaacgaagatgcactaaatgatgatatcgctaaattaaacagcgatgaacacaccgttatcaaggatgagcactactacaaagccatcgaacacactaagaaactcttcacaccaaaggagaaacttaggcctgtacattttacagaccttcgccactatccatggcaacttgcctctaacataggcgccccttttgcttctagcaaagaatggcagcattatgtcaatgacaagttcctcaaaggccatactgctactgaggttcgcgacctatttaaggaagcacatggacaatctcttgaaccagagatcatcgatagacgtatgactaagcgtaatctatacaacgagatgtttctcattaaccgaacgaacatccatcttattaaggatggacgtaagactaacgaccacggacacgatttgcgatactggaatacagcattcgctcgtcaacacctggttgaagatgatgaacctgataaggtccgtctagtcttcggcgccccgtcaactttgctaatggcagagttaatgtttatatggcccatacaagtcagcttgctgaaccgtggacctgaatctccaatgctttggggatatgaaactattactggcggatggtcccgtcttcacacatgggcttctacagcccttcctcgatttgagtcagtagtgactctagattggagccgatttgataaagatgcacgccacaccgtcattcgtgatattcacgcaatgattatgcgaccaatgtttacttttgaacatggctaccaccctacctaccactaccctgacacttccgacaccgaccctgcaaggttagagaacttatggaattggatgactgatgccatccttaccacccctctgatcctaccagatggtagtgtcttaagatttaaccattcaggtatttattctggatatttccagactcaaatattagactctatttacaattgtgtaatgatttttacgatactatcccgaatgggattcgatttagatcgcgtagaaattaaagtacaaggcgatgattcaatcatcttgcttatgtcccattatactacaatcaaggactcatttttaccattcttctcactttatgctcaacagtattttggctctatagtcaatactaagaagagcgaggtgctcccttcactagaaggagctgaggtactaaaataccgcaacttcggcaccatgcctaagcgagacgaactacaactattagctatgctgagacatcctgagaggacgtcttcattgccatccctaatggcacgagccataggagttgcctacgctaattgtggtaatcatacccgtgtataccaaatttgcgaggatatccataacttcctggctaaaggcggatttacccccgacccttatggtttaccaggtagtattagatacagacagaattatattccaagttacgtgcaagttgacattagtcactttccgacgtacttcgaaactgtccaacatctccaagatccacagcgcattatcttaaccgataagcactggcctaaggatcactttatcggaatccccggaaagtcttaa

SEQ ID NO: 1282 - DNA, 1383 bp, Palkane alphapartitivirus 1
  source 1..1383: mol_type = other DNA
atgtaccgacaagcattaattcaattaaagaaagcaatcaatgtcactgaaaagctaaaaacagttcatttcactggcacgcgtatgtatgatcttaacaaatccgcttccgctgaactaccctacaccgatgatcctgcattcaaaagacacgttttaaagcgtttccagaatggagagatagttaacgaaaggttaacgaaaggaaatggagaaaacttcattctattcaaggaaagaggtaagttacatcaaatcaaagacaaaattcttccattcgagaaaatggtgcacgacataagaatgcacgcacgatctcatctaacgaaagtagataaggaagataaagtacgagcagtatatggagttccatgtacagtaatttatgccgaaatcatgatattttggccactaatggctcacttaaaatcacaggaaaatagttttatcgcatggggatatgaaacctttagaggaggtctcgaaaaattaagattagaagttcacaattatgatgttcatctatctctcgatttttcaacgttcgacaaattaataccattctggttaatagacgatatttatcagatttttattagtttatatgaacttggaccttattacgaagacgatccagactaccccgatccagcaactaatccacaaagaattaaaaatatttgggaattcgtgcttttctctgttaaacattcaacatatagagcacctgacggaagtaggtatcaaaggaaacatagcggtttcccatctggcttgctacaaacacaacttcttggaagctgttgtaattatgtaatgattgttactgcaatgaatatcctaggctttaatgagagtgactactcaataaaagttttaggcgatgattcgtgtatatcaataaggactcaaaaaccgccttgtgatattataaacgaaatatccatcatatcaaagcagttatttaatgcaattattaatactaacaaaagtacttattctgttggcacctcaaatctgcaattcttatcatataaaatgactaatggggcagtgactagagttaacgatgaccttctaggtaaactagtttatccagaaaaggcacactttacaagagagaccacaaaatcaagagctttgggaatattaatatctaacttagggtataatgagtatattcatgctatttgctgtgatattatcacaaaattatcagaatatgcctatacaactaggggtttaaactggtatgatcagaagaaacttgattttattaagaaatataccaaagatttacccactagacatgaattatttatcatggccttaacaccactaccgaatgtaacagacgaaaatttcgacaaattcattagatga

SEQ ID NO: 1283 - DNA, 1383 bp, Palkane alphapartitivirus 2
  source 1..1383: mol_type = other DNA
atgtacaatcaagcattattacaactaaagaaagcaatcaatgtcactgaaaagctaaaaacagttcatttcactggcacacgtatgtatgatttaaacaaatcaggatccgccgaattaccctacaccgccgaccccaatttcaagaaacacgttttaaaacgttttgaaaaaggagaaatagttaaccaattgttaacaaaaggaaatggagaaaacttcattttatttaaagagcgaggtaagttacatcaaattaaagaccagattcttccacacgagaaactactgcacgacataagaatgcacgcaagatctcacttaactaaggttgagaaagaagacaaagtacgagcagtatatggagttccatgtacagtaatctacgccgaaataatgatattttggccattactcgctcatttaaaggaacaggaaaacagttttattgcatggggatacgaaacctttagaggaggtctcgagaaattgagaattgaagttcatgattatgaccttcatctatctctcgacttttcaacgttcgacaaattaataccattttggttaatagacgatatttatcaaatttttattagcttatacgaacttggaccttactacgaagacgacccagactaccccaacccgaaaactaatccacaaagaattaaaaatatttgggaatttgtactctattcagttaaacattcaacttatagagcaccggatggaagtaggtatcaaaggaaacatagcggtttcccatctggcttgctacaaacacaacttcttggaagttgctgtaattatgtaatgattgttactgctttgaatatcctaggcttttcggaaaaccaattttcgatcaaagttttaggcgatgattcatgtgtatcattgaggactcaaaaaccacctcaagatataatacgtgatatatcacttatatgcaaacagttttttaatgcaattattaatactgacaaaagtactttttccgttggcacctccaatctgcaattcttatcttacaaactagataaaggggcagtgataagagttaatgatgaccttctcggtaaacttgtttatccagaaaaggcacatttcacaagagagacgacgagatcaagagctttaggaattttaatatctaacttaggttacgatgagcacatccatatagtttgctgtaatattatagaaaaactatctgaatatgcttacaccactaagggcttgaattggtacgaccaacaacgacttgaaatactcaagaaatttaccaatcaaataccctctagacatgatttatttatcatggccttaacaccactaccgaaactaacagatactaacttcaataaatatctaagatga

SEQ ID NO: 1284 - DNA, 1761 bp, Paris alphapartitivirus
  source 1..1761: mol_type = other DNA
atgcagaacatcgaaaagatcgctaacttaccaaaattggcaaaaccaattttaggcagctctgatcccgaacggaatcccaagtacggtcaaactgttgaccacgcactcgaaaagtttctcacagttgatgaacttaacatcgtaattcatggctaccgccgttcccaatggaatagcacagctttagatcatgatattgaagctctcaatactgttgaacacaaagtcattaaagatgagcattattataatgctatcagacatacttataagttgttcaaacccgaaactcttcttcggcctgttcacttcgctgatcttcgacattatccttggcaattatcgacgagcattggtgctccatttgccactagcaaacactggattgactacgtcaatcagaaatatgatagtgactttaaatctcaaaaatatcgagatttattcaaagaagcccatggcttatcactcgaaccaagaatgatcgatcgtcgtatgacgaaacgaaatctctataatgagatgttctacattaatcgaaagaacatccatcttattaaagatggttggaaaactaactcctctggacatgatctcaagtattggaataccgcttttgcgcgccaacaccttgttaagtccaatgaagacgacaaagttcgtctagttttcggagccccgtccactttactcatggccgagctcatgttcatctggccacttcaatgcagcctcctctctcgaggacccaaatctccaatgttatgggggtttgaaaccaccactggcggttggtctcgcatatacaattgggcacattcccaaagcccaaagtttgagaccgtagtaactctcgactggaaaagattcgacaaagatgcccgacattctatcatcaatgatattcattcaatgattatgcggcccatgttcgactttaccaaaggttaccatcccactgtcacttacccaaataccatctctactgatccacaaagattagagaatctatggaattggatgactgactcaatcaccagcattccgctaatgttacctaacggtgacttattagcttttaagcattcaggaatctattcgggttatttccaaacccaaattctagactccatgtacaatagtgtcatgatattcaccattttatccaaaatgggattcgatttaaacaacattcacatcaaagttcaaggcgatgattccatcttccttctaccccatcaatttgtgatgttgaaacccagtttccttcaattcttctctcaatacgcaaaagaatactttggctcaactattaatttagataagagcgaaattctccctagccttgaaaatgctgaagttctcaaataccgtaataaggcaacaatgccctatcgcgatgaactacagctacttgcaatgcttcgacatcctgaaagatcggtgtcacttgagtccttaatggctcgagctatcggcatagcttactcaaattgcggaaacttcacacgtgtacatcgtatttgcgaggatatttataattttcttgcaggttgcggctttactcccgacccacacggtctaccacgcggattactctttcgccagaactacatcccaggttatgaaatgattgatttaactcactttccaacctattttgatacagttcggcatttacaggatccatctcgtgagctactctctgagaagcactggccacgcaagcactttatcggcatccccggaaggtcttaa

SEQ ID NO: 1285 - DNA, 1761 bp, Pear alphapartitivirus
  source 1..1761: mol_type = other DNA
atgcgaaacactgttgtagttggaaatattccaacacttgccagaccgcttcatgggaatccagatcctggatcaaaccctgcgtacggcgaaacagttgatcacgctctcaggcgatatctttctcctgaagaattcgataccgttgtccatggctttagacgctcaccctggaatcaagacgcacttaatgatgacattgctaaattaaacagcttagaacatcacgtccccaaggatgaacattactatcgtgccatagaacacgtccgaaagctcttctcccccgagaagaaacttaggcctgtacattttgcagacctccgccactacccatggcaattgtcctccaacataggcgccccttttgcttcaagcaaggaatggcaatcatatgtaagcgataaattcgcgaaaggacacacagccactgaggttcgcgaccttttcaaggaagcacacggcatacctcttgaaccagaggttatcgatcgacgcatgactaagcgtaatctctacaatgaaatgtttctcatcaaccgtaagaatatccatcttattaaagatggacgtaagactaacgaccacggtcacgacctgcgatactggaatacagcattcgcacgccagcacctagtcgaagaaaacgatcctgacaaggttcgtctagtcttcggagccccgtcaaccctgctaatggcagagttaatgtttatctggcccctacaagtgagcttgctctctcgtggcccagaatccccaatgctttggggttatgaaacaataaccggcggctggtcccgtcttcacacatgggctaaccaagccctacctcgatttgagtccgtagtgactctcgactggagccgctttgacaaagatgcgcgccacaccgtaatccaagacattcacaccctcgttatgaggcctatgttcgatttcgaaaatggctaccatccaacaaagttctaccctgaaactccaggaactaaccctactaggttggaaaacctatggaattggatgaccaacgctatcctaactactccattgatcctcccagatggacaggttcttaaattcgtacactcaggaatctactctggatactttcagactcagattctcgactcaatgtataactgtgtcatgatattcactatcctatctcgaatgggttttgatatcgacaaagttgcaatcaaagttcaaggagatgactccatcttcctacttcttgcacattacattacaatcaaggacagtttcctaccatttttcaccacttatgcacagcattacttcggttcaaccgttaatattcggaagagcgaagttctcccttcattggaaggtgctgaggttcttaagtatcgtaaccacggtactatgcctaagcgtgatgagttacaacttctagctatgctcagacatcccgagcgcacttcttccctatcttcattgatggcaagagcaatcggcgtagcatatgcgaactgtgggaattacacccgtgtttaccaaatttgcgaggatgtttataacttcttagcagagggcggattcacccccgacccctttggtttgccaggtggaatcagatatcggcagaactatgttccaagttatgtccaaattgacattggtcaatttccgacttacttcgacactgtccgacatctccaagatcctcagcgtattatcttaacagataagcactggcccggatctcactttatcggcatccccggaaagtcttaa

SEQ ID NO: 1286 - DNA, 1737 bp, Rhizoctonia solani partitivirus SM03
  source 1..1737: mol_type = other DNA
atgttcaatacgctttatgaatctatcaagcgcttctttaaattttctgacccccatgatttcaagtacaacttcgaattccttggttacgctccgaactatatcaaagttagcccttttcatcgtaatgaatatacttatcaacattatcaaaatattgtgcgcaaagcattggaaaccgaactttatggctccgatgttatttatattactcaagctttccatcatcctgtggctacgatggacttcgttatcgaaagtctacgcaaaggcgacctgcctgaccacataataccaaatgatgaacacttccgtaatggtttcaagtacgcaatggaacgttttcgacctccttatcgacttagacctgttcactttactgatctcgtccgttacaaatggaactggcatccaaacgttgaagaaccttactactctaaccgtcaactggaacgtgctgttcaaactgcacatgaatccggtcttattcctgatggtagaatgtccttcggcaatctgaagaatttcgtcttcatggatactcgtcacttccttcatcaaatcaaacgcgacgaagttacctctccctctactctttggcctttaatgaaaatccatgtcaaatctgcactcaccaaaaccgacgaaacgaaagttcgcgtcatttacggagtaagcaagcgacatgtcttagcccaagcaatgttcttctggcccctcttccgctactacattgaatcagacgatgacccactactctggggattcgaaactgttctcggtggcatgatgaagatgcacatagccatgagcattcctcgcctctactggacgactttcgtcacagttgattggtctggcttcgacctccgctctttattctcactccaacgtgcttgttttgacgaatgggaaacctggttcgatttcgaccgtggatacattcctacgaagtggtaccctgacacaacaactgacccaattcagatcaaacgactctggaactggcaacgtgatgcatgtttccgcatgccttttgtcatgaacgatcactctatgtattctcgacgattccgatctatcccatctggtctctacgtcacacagtacctcgactcaaatgtcaacctagttcagatctacactatcttggacgctatgggtttcgacatccgtcaacagactcgagtacttgtacaaggcgatgattccgtcattttcttggtgttccacatcccggctgatcagcatgttgagttcaaatctcgtttccaagcactagcaacgtattatttcgatcacgtcgcaagagctgaaaagaacgagctttacaacgagcctaacggcgtcgaagtccttggttaccgcaactacaacggttggccaatccgcgactggcgcaagttactcgctcagctataccatccgcgcggtgctcccgatgagccaacactcatggcacgctgctgtggtatcacgtacgcctcaatgtatcatccgcaagttgtcgctgtatgcaagaacatttactcttacctttacaataagggtgttcgtgctgcacaactaaaacagatgcgcgatgtcattttatttggcgaagctgaatatcaaatcccaacagatcacttcccgttggaacacgaagttcacagacaccttcatcaaccgtacattcggacgcaagaagaccgagatgcctactggccatccgatctcttccttgatgtgtgttaa

SEQ ID NO: 1287 - DNA, 1812 bp, Rosellinia necatrix partitivirus 2
  source 1..1812: mol_type = other DNA
atgaagaacatcactgacctgcccttcccctcgaaaggcgtcccacaatttcgcgacgctcttccgatccacggacgagaccctgaagttccgaaccctgttactgacgcttcgaatcgaattatcgacttcgcgctcagaaagcacctcacatccgatgagtttgaccaagttgtcaacggctatcgacgttccccctggaatgaagacgctctcaacaaagacatcgagaaacttgactctgatgaacacactgtcatcaaagatcaacactacgagaatgcaatccaacacgttcagaagctcctcaccccagagaagccccttcaacccgttcatttcgcagatctacgcagatacaaatggagactctccactaatatcggcgcacccttcgcttcatcaaaacactggcaagattacgtaaaagctaagttcaatcactttcgtgatggaacaccctttgagaatatcgcacaccgcgatcttttcgtcgaggcacacaaagactctcaaccacttgagatcaccgacgcccgtatgacgaaacacaatctctacaccgaagctttctacgtttcccgagaaaccattcaccgcatcaaagatggtgagaccaccgaccggtacggcaacgacgcccgctactggaacaccgcattcgcgagacaacacctcgtaaaagcagacgaagacgacaaagttcgtttagtttttggcgctcccttttctttactatgtgcagaactcatgttcatatggcctctctttattttcctcctctccctgaaaggatcgaccgcattcatgctctggacgttcgaaactatcattggtggctggtaccgacttgtgaactttttcactacctacgcactccgacactctactgtcgtgactgttgactggtctggatttgatcgctacgctcgacacaccgttatcaaagatattcatcatcgaattatccgtcctatgttcgacttttcacatggataccatcctacacgtgactaccctgacacgtccaagactaaagatggacaatccaacgaatggagaatcactaatttatggaattggatgaccgacgctatcctttccactcccttgctccttcctaacggaagattcatccgcttcaatcactctggaatttattccggatactttcagacacagattttagactctatctataatctagtcatgatctttactattctatcaagaatgggatttgatcttgacaaatgtgttattaaagtccaaggcgatgactcaatcttcatgttactctgttgtttcattatgatttccacctctttctttacgctctttaaatattatgcagaatactattttggcgcaaaactcaatgagaagaagtccgagataagaccctcgctccaagacgcagaagtactgaagtatcgaaaccgcaacggtattccctaccgtgaccggatttcactactagcacagctacgacatcctgaacgacgcactgacgttgattctgtcgcagctcgttgcattggtattgcttacgcagcctgtggccaagacgctacagtgtacctcatttgcgaagatatttacaactatctcgtaaagaagtacgacgctcacgcacgccaaggagaactagatttcatgtttcgacatctcgaacttcatgatactgttccctccgccgcaacattcccaagctggtttgataccatggcacatctgactgatggaccgcgggaccctgtcccctcccattggccaacagactattttattggtctgcctggtcgtctctag

SEQ ID NO: 1288 - DNA, 1779 bp, Sclerotinia sclerotiorum alphapartitivirus 1
  source 1..1779: mol_type = other DNA
atgcagaacaacacagtgattggtcaattcaaacatctcggtgctaagatacatggatctacttccattaatcctacctaccttgagatcgtcgaccacgcactcaagcgttttctcactcccgaagaatgtgaatccgtcatcaacggctaccgccgctcagcctggaactcagacgccctccaaaaggacatcgacaagctcaactcacccgagcacccagtcatcaaagatgaacactatcacaaagctctcgcgcacgtcgctaagctcttcgctccaaaagagaaactccgccctgttcatttcgccgacctccgtcactacccgtgggaactttcgactaacatcggagctccattcaacacttccaaatcttggcaatcatatgtcaaatcaaagtttgaagacaactacatcctcgacgaaaaatacaaacaaacattcactgatttcaaacaccgacgcgatttattcgctgaagcgcacaacatgcaatctctcaacccaatggttgacgctcgtatgacaaaacgaaatctctatactgaaatgttcatgattaaccgcgatcacatacacaggatcaaacgaggtatgaaaacgacccgcacaggtcacgacctccgttactggcacaccgctttcgcacgacaacatctcgtgaaagcagacgaagaagacaaagtccgactcgtctttggcgccccgtccctcctccttatggccgaacttatgttcatatggcctatccaagcctcactcctctcccgaggtgaagaatctccaatgctttggggtttcgaaactctgcttggcggatggcaacgcctttacgcctgggcataccgcgcactcgctgcgttcatgtccgtattcctgctcgattggtctggtttcgatcgttatgcacgtcacaccgtcatctccgacattcacgctcaaattatgcgtcccatgttcgattttgaaaacggctactggcccacacatgactatccttcaacaaccgctgatcccgctcaactcgaaaatctttggaactggatgactgatgcaatactcacgactcccctcatgctcgaagatggaacactccttcgtttcctccactccggtatattctctggttacttccaaactcagattctcgactctatgtacaacgctgtaatgatatgcaccattctttctaagatgggtttcgaccttgataaagtcaagttcaaagtccaaggcgatgattctatcatccttatgctctacatgctccttactcttatcgcaacctctttcctcaaattcttctccttctacgctgaccaatattttggcgcaaaggtctcagaatccaagtctgaacttctcccttccctggagaacgctgaagtcttgaagtatcgcaacaaggcatccatgccctaccgcgacgaacttcaacttctagcaatgctacgttttcccgaacgttcatcaaaccttgaatccctcatggctagatgtattggcatcgcttacgcagactgtggaaaccacccccgcgtatattctatttgcgaagatatctataaatttcttgctgcaggtggaatttcccctgacccaaaaggtctgcctggtggactaaggtaccgctcacgttacgttcctggtgaatacgacatcgatttgtcgcacttccctacctggctcgaaacggttaagcaccttcttgatcccgcccgaccacttctcactgagaagcactggcctcgcaagcactttatcggtactccgtaa

SEQ ID NO: 1289 - DNA, 1779 bp, Trichoderma gamsii alphapartitivirus 1
  source 1..1779: mol_type = other DNA
atgcagaacaacgaagtgattggtcaattaaaacatcttggagcaaagattcatggaacttcttccatcaatccacattacgctcgagttgtcgaccacgctttagctaagtttctaactcttgaagagttcgacattgtcgttcataaacatagaagatcagcttggaattcagatgccctacaaaaagacatcgataaactaaactccactgaacactcagttatcaaagatgaacactattggaaagcaatccaacatgtctctaaacttttcaaacccaaagagaaacttaaacctgttcatttcgccgatttgcgtcactacccatgggaattgtcaactaatattggagcacccttcaatacatctaaatcttggcagtcttatgttaagcaaaagttcgataagaactacatactcgacgaaaagtataaagtaacgtttacagattttgaacacagacgtgatctgtttgcagaatcccacaatatgcaatctctcaacccaatggttgatgctcgcatgactaaacgaaatctatatactgaaatgttcatgattaatcgcgaacacatacacagaattaaacgcggaagtcacacgtccagaactggacatgacctacgctactggcacacagccttcgcccgccaacacttggttaaggacgaagagccagataaagtaagacttgtttttggtgcaccatcccttttgctaatggcagaattgatgttcatatggccaattcaagcttcccttctatcaagaggagaagaatcacccatgttatggggatttgaaaccttacttggaggatggcaaagaatttattcttgggctcaccgcctaatgctatctttctcttctgtagccctactcgactggtccggtttcgacagatatgcaagacatactgttattaatgatatacatactcatattatgagaccaatgtttacatttgaagatggttattggcctacccatgactatcctgacactaccgccgaccctcaacacctcgagaatttatggaaatggatgaataacgccattctatctaccccacttatgttggaagatggaaccctactgcgttttcgccattcaggtatctactctggttatttccagacacagattattgactcaatttacaattcagtcatgataagcaccattttatcaaaaatgggctttgacctcaataaagtacacatgaaggtacaaggagatgactctctaatcctttttgtttacatgttcctctcactcatcgcgatgtccttcctcaagacattcagctacttcgctcagctctattttggagccgttctctctgaaaagaaatcggaattacttccgtctctagagaatgcagaagtcctcaagtatcgaaacagaaatgcgatgccctatcgcaacgaacttgaattactagctatgcttcgtcaccccgaacgcacctcaagctacgagtccttaatggctcgcgctattggtatagcttacgctgactgtggaagccacccccgtgtatactcaatttgcgaagatatctataagtatcttgccgcgcttggtatcacaccagaccccaaaggtctacccggtggacagagattccggtctcgttacgttcctggagaatgggatattgatttatctcactttcctacatggtacgaaacagtccgtcacctttgtgatccagctcgcccacttctcactgagaagcactggccgcgcaagcacttcataggcactccgtga

SEQ ID NO: 1290 - DNA, 1788 bp, Tulasnella partitivirus 1
  source 1..1788: mol_type = other DNA
atgttgaacctcaagttcctcggctctttccccgccctcgctcttcctattcacggacgcgatcccacggaatcgaacactcgaactgaaacctcaaatcgcattatcgacttcgcactcaagaaatatcttgaaccagaagaagcagatacagtcatcaatggctatcgtcgctccccctggaatgaagacgctcttaatcacgatattcagaaactcaattctgaagaacattcagttacaaaagacgaacactactggaacgcaatcaatcacgttgcaaaactcatcaaaccagaagttcctcttcaccctgttcacttcgccgaccttcgccgctactcatggcgtttatccactaacattggcgctccatttgcgcaatctaaatggtggcaaaactacgtcaaagctaagtacaattacttcgctcacggcactcccttcacattcgaacaccaacgagacctattcgttgaagctcatcgtcaatctcaaccactcgagatcacagacgcaagaatgacgaagcacaacctttacactgaggctttctacatcactcgcaaaaacattcatgaaatcaagcttggtcacaagaccaacagcaaaggacacgacctacgctactggaataccgctttcgctcgacagcatctcgtcaaaaccgaagatcctgataaagtacgactcgtattcggcgcaccgttcactttactgacagctgaactcatgttcatatggactctccaagtccaccttctccaaatgaaaggctcacgctctttcatgctctggggttttgaaacaatccttggcggatggtacaggctacgcaatttctttgctcgctatgcaccccgacacacactagtcgcaactctcgactggcgcggatttgacaaagacgctagacatactgtcatcaaagacattcacactcatgtcctacgtccatgttacgatttctcaacctaccacccaacgaaggattaccctacgtactcttctgaacctggcgaactgccaatcgaagaacgaatcaccaacctctggaactggatgaccgacacggtcctcactattcccctgatgttacctaacggtgacttagtccgatttactcattccggaatcttttctggctactttcagactcaaattctcgattctttgtacaatatggttatgattttcacgattctatctcgcatgggattcgaccttaacaaagtcgtcctcaaagtccaaggcgatgattcaatcattatgttactatgtgttttcatcctagtatgcacttcttttctctctctcttcaagcactatgctctattttattttggttctaccctgaacgaaacaaaatcagaaatacgtgactcccttcaagacgcagaagttctcaagtatcgcaacaaaaacggtatcccttaccgtgatgaactctcactccttgcacagctccgacaccctgaacgttccacagacgcagacgcggtcgccgctcgctgcattggtatcgcttacgctagctgcggacagctcccacggacctataagatctgtgaagacatccacaactatctagtcaagcactatgacgctaaaccaagacaagcagaactcgatttctactttcgacatctcgatgtcgcaggtgttaatatcgaagctcgctttccctccttcttggaaaccgtcaaccatctgatggataacgaacagccactcgctgctcaccattggccgaaagactatttcattggtcttcccggacgtcgttga

SEQ ID NO: 1291 - DNA, 1761 bp, Tulasnella partitivirus 2
  source 1..1761: mol_type = other DNA
atgcaaaacttgagaatactaggctaccagcctcgattccttaccccgaacgcttcgttcgccccaagccaacaaatctccttttcccctagacaagaggaacaccacaggaagatagttagaagagccctacgcaaatatggttctaaagagcttatcgacgaaacaattcatggatacaggaggagcgcaggagacgacattgcggcagagaaagactttctgaaaacagaccaaccatacgttgatctaaagagagacttccactacaaacgagctttacgtttaaccgaaaagctgtttcgcccttcgcgtcaattacgacctattagttttcccgacctacgattctacccctggaatctttcaactagcgcagaagccccattcactataaaaaagagatggtacgagcatgtacgaacgaaacaagctggaggagatgtcgaaaattcgagaatgagttttcataatttatacaacgagatctttcacgagaacagacgacggattcatatgattaaggatctggacagacaattctgggaagaagatggaacacctaaaccttactactgggctgaactgcacacccgtgcacatttagtcaaagcagagaaggaagacaaaaaccgagcggtttttggcgtgccaaagttattacttatggctgaaaatatgttcatctggcccctaatgtccgagtaccttaacatgcgtgtcgacgccccacttctatggggattcgagaccattcgcggtggctggaaaaagctacgacgcgatatccgatctaagtcaagaggtgcaaacacattcatctcagcagactggagcggctttgaccacaaagcacttcatgctattattgacgacgttcatcacatgtggagatcatggttcactttcgatgatggctaccagccgacaaatgtctacccagacagttctactggcggttactcatctgacagaatcgacaatctttggaactggatgacttggaacatcaagcacatcaggataagaggagcatcagatgccctctatcaatggcaattcaatggaatagcctccggataccaacagactcaactacttgattcatttgtgaactgcataatgctactaactgtacttagtgaagctggaatcgatatcgattcgcccgaattctacatcagagttcaaggtgatgacagtatcatctgcttccgagaacggaaatttcatttagaaggaaagcactttctagccaaaatatcaatgatggcaaaagagaggttcaacgctgacctgtcacctgacaaaacaacatatggtgataacctaaacgaccttgaagtccttagttacaagaacagaaatggcatagcatacagagaagaagccgaactactggcacatctactatatcccgaaaggcctagagcctacgaggcacttgctgctgcgagtgttggaatagcgatggcgtcaatgggatgctcacgatcagtttacctgatttgtagagacattcacatgcatttgacttcctatcacagattcgaccaatctaagtatgacaggcactacatctttaaaggaatgaagataccaatcccaaacgatcttggtttcccttcttttgacgagttgttttcacagaacttcgacctccgagagcggaccgaagcagagaagcaacatttgtggcctacacgagacaacggagtacggacggagcaatttccagacggattctattttctagagtaa

SEQ ID NO: 1292 - DNA, 1860 bp, Tulasnella partitivirus 3
  source 1..1860: mol_type = other DNA
atggactaccttacgcacgctttttctcgaatcacttcttggttcaagaaacctactaacctggaatacgtcggtgtttacgaacacgacccaccacggactgcgtatactaatttgacagcacttgataatcatcaagctacaattatgcactcaatgcgcaacttcttcacagatgaagaaatacatcgaatcacgcacgactatcgtcgttccgagattacaatggaggctattttagccgacttcttcgctaatgacgttgaacagcacgacataccttgggaccaaaacaccgaaaatggactcgcctgcatggcagaagcctttcgaccaccaagaccgtgcctacccgcacacatccaagacgttgaacaccattatccttacaaatggcaagtaaactcagaaccaccgttctcaacggatgcatattttaaagaaaaccttcccacattcggagagttcatcgactcacacggatacgaccacatcgacaaagaagattttctccgccgtcatcaagatcttgacaatccgtcatttcgcaatcaggtcacacctccaaaatttggattccaaaagacacaaatcttcaactggaccagacgctggcatcacatcatcaaagatggattcactaacacgaccggactgatcaacgactactacctacaacatcgctacatatttccgatgttgcttcacactaagaccgcaatcgtcaagaaagacgatccgaacaagatgcgaacaatctggggctgctcaaagccatggattatcgctgacacaatgttttattgggaatacatcgcttgggctaagctcaatcgaggtgcgacccctcttctctggggttatgaaaccttcactggtggatggttccggctcaacgccgaacttttcaacggatacatgaaggctagtctcatcacacttgactggtcacgtttcgacaaacgcgcttacttctcactcatcttacgcattatgtacatcgctcggacttttctcgactttaatcgtggatacctgcctaacgtatcatatcctgagcacaagaactggaacgctgacaaagcaaccagacttcaacgcttatgggaatggacacttgaaaaccttttcaaggcagccatcgttttaccaaacggtgacatgtatcaacgacgcttcgctggcataccatcaggcctatttattactcaacttttagattcctggtacaactacactatgctcgcaacacttctctccgctctcggactggaccctcgaacttgcatcatcaaagttcaaggcgacgacagtatcatacgtctcgccgtcctaataccaccgaacgagcacactcattttttgactcgactcacagaactggctgaatactacttcaaagccgtcatcgcagcaaagaaatcagagatgtctaaccaactcaacaaccgcgaggtcttatcataccgacacatcaatgggataccataccgtgatgaattcaaaatgttagctcagttttaccacactaaagctagagatccaacaccttccatcaccatggcccaatgcatcggtttcgcctacgctagctgtggcaatcactctcgagtactccaatttcttgaggatgtttacctctactacgctaaacaaggctacacacctaaccgcgctggacttaccgcaatcttcggcaactcacccgacatgatcgattttcctttcgcccttgaccactttcctactaagaaagagatcagacagtacttcgtctcgacagattacaagaatgaaatttcaaacgccaaaacatggcctatgacatatttcacttaccctccttgtcatctattctaa

SEQ ID NO: 1293 - DNA, 1851 bp, Vicia cryptic virus; identical to SEQ ID NO: 612
  source 1..1851: mol_type = other DNA

SEQ ID NO: 1294 - DNA, 1851 bp, White clover cryptic virus 1; identical to SEQ ID NO: 611
  source 1..1851: mol_type = other DNA

SEQ ID NO: 1295 - DNA, 2268 bp, Betapartitivirus sp.
  source 1..2268: mol_type = other DNA
atggccctaactatcttcatgatcgtcactctgaacattctcctcagatttcaacatcgccgccgaaactcccgcaccttgaaggatctttccttccccatccgcaacattctatttgaatgggaaactcgccgctcgatcccacgctcccagcctgactccgccacgatatttgactactccaagtcactcctcgcctacatcgacctccacacatgctatctcctctcccataatcttgaccaagaaatggaatcaattcgtgaacgctactcccagcgcgaacagaactttgatcttcatcaacactacgacgtcacagatcttccagaagaccgataccccgcccccggaatccgattcgccgaacgaatttatcatgacatcccatccgctgtactcaatcgtgatgacatccaaataccaatctccaacgatcccagtttcatcgaaacaccagacgcccgctccggcattctttatgctgaatcactcgacctctcaggtgccccacccatccccgaaattgcccagatcatccacgactggttcccccactatgaagtttacctcactgaatactgccgtcctccctcatatggaccccaagctttccttgactttaataggcccaccccctcccccgccccgcccacacccgaacgccacgaagcaatcatgcgtgttgtccgcgccaaattggctatcaagccataccggcccctccacttcgccgacgccctcgccgccgaaacgccactcaacacctcagcttcctatttctccaagttcgaccctcgaactagagtttacgctcgctactccgccccaaaacgatacgctgaccgaccgacctccaaaggatatttcatcaatgtaatgctcaaccaatttcgccgagaaatgcataacgttaaagatgatggcctccccttccccactggtgactttgaccccgaaatcgaagcagataagcttcaatatttcttcaagaaccacccctcccagctgttcatccgcacgcagatctcaaaacgcgatccctccgagcccaagaaaatccgccccgtctactccgttgatgaccgtttcctccacatagagaaaatgctcgtcactcccgccctcgcccaaatgcgcaacccccaatgctgcatcgcacacggcctcgaaaccttccgcggttccatgcgcctcctagacatcgtcgctctctccttcttcgtttttatatcactcgactggtcacaatttgaccaacgccttccctactacgtaatcatcgccttctttcttgattacatcccctccctgcttatagtatcacatggttacatgcccacccgcacctacccagataccacccaacctaccccacttttttcacgcaaaatgtttaatatcgttgtatttctactatcatggtacctctccatgacgttcctctcctacgatggttttgcctacattcgtgaacatggtggtgtcccgtcaggattactgaacactcagttcctagactccttcggtaacatgtatatcatcgttgattgcctgcttgaatacggatttagtgaaagcgactgccttgagatgctcttctgtgtattaggtgatgacaacctcatcttcttacgacagaacttctcacgagttcatggttttatggaattcctggaccgctacgctaagcaacgacacggaatggtactctccatccttaagtcagtttacactacgctacgctccaagatcaccttccttagctatgagaacttttacggaatgcccactcgccctatcggcaagctcgtctcccaattagctatgccagaacgtccaatccccgactcaaaaagttggattcacgccgcccgcgcactaggccttgcctacgccaactgtggccaagaccacacgttccacctcctatgcgaaaaggtataccaaaagtttcgacccacgacccccgtcccgacgcaccacgtgcagaagatcttccgaaagtggaaacacgaactccctgagtttgacatcgaatctgtggaatacacattccccgaattccccactctccacgagatccgccagctcgtccatgaatatcatggcccgttttccgaaatggataaatggaacactgatgtttttaacgcgccgccaagcgacaacctaccagattttacgactctgaaggactttatgaaccaagattcagaaatgtcccgcaccgccgccgaattttggcatggtaagagatccatttag

SEQ ID NO: 1296 - DNA, 2238 bp, Cannabis cryptic virus
  source 1..2238: mol_type = other DNA
atgccttacaacgctgtccgcaattatcttgctgaacgtatgatccgcacaaaaagagaatggcaactttaccaatcctctaaccgtgatcctgaatcgactcttgaacattatcaagattctgactacttacgttattaccagaatgcccgttttaaccttaaccaagaagaacgattccgcgccttaaacaaagaatactctacactagttgaagcatttagaactgacaacctacgaaagcaccaaccttatgagcttcaccagcccattcctcctgatgctgcccctattcctgacaaacgtcagcctgcccctggaattaaattagtcccactcatgtaccactatggacatgttgttcatgataccccttctactactgatgatcatacatcaaatgatgattctcaatcagcaccatccagactgttaaaaactactgaatttggttactccattgacaaacaaatctatgatctcgtttgccgtagatatcctacttatttatcagttattaacttgtactgtcgacccctcggtactgtagatgctacattctctgactttaacaaagaacagataccatctaatccgattgatcctgataggaaagaacatgttctgaaacacatttttaagtttctggacgccaccccttacttacctgtccactttgttgacactcaattctgcaagactcctcttgttactggaactggctaccataaccgctattctttcaaacagaaagcacatgcaaagtattctcaccctgaagaatatgccacatacccttcctctaaaggctacttctacaatgctacttatgagaatgcccgcactttggttcactacatcaaacaaaatggtctaccatttgaatttgattttaatctctctgaagaatccctgaccgacgaacaaattgatttattcgtcaacagatccaatgcctttttcaatgattacccgacgttactattcactcgtaatcacatttcgaagcgtactggaccactaaaagtccgccctgtttacgctgttgatgatatttttatcattattgaactgatgttgaccttccctctcactggtcaagctcgaaaaccctcatgctggataaggatggctagaaaccattcgggttcaaaccgatacattgacagacttggtcgttcgtattcgaccttctttttcataaactgggcaagttatgatcaaccaatgccccgtgtaattactgacatttattacactgacttccttcgaagcctgatcgttattaaccatggataccaacccacgtatgaatactccttttaccctgaccttgatgaacataagctctatgatagaaagaataatcttcttttctttcttcatacatggtataacaatatgaccttccttctcccggatggttttgcataccgcagatcttactgtggagtcccttctggcctctacaatactcaataccttgattcttttggcaatctatttttaataattgatgccatgattgaattcggtttcactgactctgaaatcgatggatttgtcctcctaattttaggtgatgacaacactggtatgacacagatgcacattcatcgcatctcccaattcatcaactttcttgaaaaatatgctttagaacgctacaacatggtcctctctgcgaccaaatctgttctaacaactctgcgctcaaaaattgagaccctcggttaccaatgtaactatggatcccctaaacgcgacattgataaacttgttgcccaactctgtttccctgaaaatggactcaagccacacaccatgtctgctagagctgtcggaatcgcatatgccgctgccggccaagattacgtatttcactccttttgccaggatgtatataatatgtttaggtcttattataaacccgatgctcgtgcaaatctattcttccaacgtcaagtactccaaaatcttgaagatggaattcctgatttagccacaccggttgtgccgccattcccttcattattcgaagtccgcgagatgtactctgaatacaaaggacctctctcttttgaacctaaatggaacaaagctcacttcataaatgacccgaatgacatccctcctttctccaaaactatgcgagactatgaaaaggaacataatcttcctgttcgagtttcacctacttttgaaacggtcgtgcctagcacaaaaaatttgccgtaa

SEQ ID NO: 1297 - DNA, 1992 bp, Ceratocystis resinifera virus 1
  source 1..1992: mol_type = other DNA
atgccttctttcagtgctaaccccacttaccaaaccctcatcgatgatatcgatttcgacgtgccaattgcacatcctttttcagttatcaatacagatttacaacctgtagacgatgaagaaacagttcacgacctcggatcaaaagactttgaattctacaaagtagtttcagacaatcttcctccaacccgagctccttctattggaattgaatcacttccaaacatccgctatcataatcattcaaatgatcatagatatagagaccaacctcccacaggtcctcctcccatgcgtggtgttagaaagattattaatgactcttttcctcaataccttccttatcttaaggaatggtgtagacctaaaacgtcttcagacgccatttttgaagactttaatcagcctcaaattcctagtattccattatcttataatagaaaacaaagaattctgaatcttgttaatcatttcatgggcgtcaaaccctacgacatagtgcacttctgtgacactcgcttttacccttgggatttatccaagaaagctgattatttccataatcacagtaatgcgcgtaaacgacatgcacaaacgtctcacgcttcaacagcaaccgggccaaccaagaaatcttggttcattaacgcccacctgtttcacgatcggtcaacagtccacaacattaaattgtatggattgccctttaagccccactcatatgaggctagaaataaaattcttttagaactatggttcaaaaagattccgactgaacttctagttcgatcgcatatttctaaccctaagaaacttaaagtccgccctgtcaataacgcccctatgatttttcttcgtatagagtgtatgttattctacccgctgctcgcccagcttagaaaacaacaatgctcaataatgtacggacttgaaaccatacgtggtggcatgatggaaattgaaagtctagctactagattttcgaatttcatgatgattgactggtctaaatttgaccaaactgttccctttactctggtagatatgttctatcaagattggattcctactctaatattagtagattccggatacgctaaaattcataactacaatgatcacgtccactcattcgcagcgcaagctcgaaaactcggtgttcatggtgatagtaatttaaatgaagctcctccagaagctgctgtctttgcaaataaagtagaaaacctcttgaaattcataaatacttggttcaaggaaatggtttacataaccccagacggttttgcttacagtcgcactttcgcaggtgtcccttcaggcattctatgtactcaactaatcgactcatttgttaatttagttgtacttatagattccttgttcgaatttggctttcatgagtctgatataaaatcagcgctcattcttctcatgggtgacgacaacgttgtcttcgctccagataaattatcacaacttcattcatttttcaaatttcttcccgattacgctaagaaaagatggaatatgaaagttaatgtagataaatctatcttcacaacattgagacggaaaattgaaatccttggctataccaataactatggtatgcccgttcgttcattatcaaaactgattggtcaactagcatatccagaacgccatgttaacgattctgatatgtgtatgcgagccatcggctttgcttggtgcgcagctgcatctgattcaacttttcatgacttttgtcgaaaagttttcatatactactacgctcgagtgaatgtcccgataaaggatttagttcaatctaatgctagtgcccttcctggtatgttctttgcatacagagatgtccaccagcacattaaattggaccattttccctccattgaagaagtccgacaagtactttcgaagcaccacggttacctaaccgaagaaccgctttggaaatacgactttttcctccaccccaaaccctga

SEQ ID NO: 1298 - DNA, 2241 bp, Crimson clover cryptic virus 2
  source 1..2241: mol_type = other DNA
atgccgttcaacgcagttcgcaattacctcaatgagcgaatgactcgcttgaaacaagaatggaagacttaccagtctaccgaccatgacccaatcaagatacttgatacaattcaagatcctgactatcgccgctacctagataatgctcgctttaatagcgataatgaaatgaaacaccttatgctaaataaggaatattcaactctagttgaagcttaccgcactgacaatgccaagaaacaccaagtttatgaactacaccagccaatccccaatgatgctgcacctgttattcaatcccgcttgcctgctaaaggtataaagttagtcccactcatgtaccattatggacatgttactcatgaccctgtttctctcaccgatgcaaatcgttctgatgatttcgaaactcaagttgttccagactccgatgctcctactcgctttggatatcctatagatgttcgcatctataatcttatctgttatagatactccaagtatctagaagtgattaatgcatactgtcgccctattggaacagttaacgctacctttgaagattttaacaaagaacagatcccatctgctcctattgatcctaaaagaaaggaaaatgtgctctcccacatacacaagttccttgataccaagccttatctgccactccatttcgtagacactcagttctgcaagactcctcttgttactggaaccggctaccacaatcgttactcttttaagcaaaaggctcatgctaaatactctcatcccgctgagtatgctaccaagcctatttctaaaggctatttttataatgccacttatgagaacgctcgtaccatcattcattttattaaagaatatggattaccttttaacgtaatcagagctgacgataaatctgaactcactgatagtgatgtccagaaatatattaatgaagcaaacagcttctttaatgactatccgacgttactgttcactcgcaaccacatttcaaagagagatggacctttaaaagtccgccccgtttatgctgttgatgatatctttatcatcatggaattaatgttgacatttcctttgactatacaggctcgaaagccttcctgttgcattatgtatggactagaaaccattcgtggttctaaccgttacattgaacaaatagctcgtgactattcgaccttcttttctttagattggtccagttatgaccagcgcttaccccgtgttataactgatatttattacactgatttccttcgaagtctacttgtaatcaataatggataccagccgacctatgaataccccacctaccccgaccttgatgaacacaagctctaccatagaatggataacctcctccattttctacatttatggtacaataacatgaccttcctccttcctgatggttatgcttaccgccgaacctcctgcggtgtaccttctggcttgtacaacactcaataccttgactcatttggcaatctatttttgattatagacgccatgcttgaatttggttttaccgattctgagattcaaaagtttatcctccttgttttaggagatgataatactggtatgacgacaatccccatttgtcgaatgtttaacttcatcacctttcttgaaaaatatgcactcgaacgctacaatatggtcctttcaacgaccaaatccgttcttacaactttccgttctaaaatcgagtcccttggataccaatgtaaccatggctcgccgaaacgtgatattgacaagcttgttgcccaactctgttatccagagaatggtttaaagccacacactatggctgccagagcaataggcatcgcatacgcctccgccggccaagatgatatgtttcactccttttgccaggatgtatataacatatttaggtctgattatcgccctgatgaccgcatgaatctacatttcaaaagacagatttttcacaatcttgaagatggaatgcctgaccttgcgccaccaattgtgcctccttttccttcactctatgaaattcgagagatgtacgcctactacaaaggccctcttgactttgctcctaaatggaactatgcccatttcatgtctgatccggataccaccccaccttactcgaaaactatgcgtgactacgaagctgaaaataatatttcaagccgtgtcgctcctacttttgaaacggtcgtgcccagcacaataaatttgccgtga

SEQ ID NO: 1299 - DNA, 2238 bp, Dill cryptic virus 2
  source 1..2238: mol_type = other DNA
atgcctttcaactctgttcgcaactaccttgctgaacgcctcattcgcctgaaaagagaatggatgaccttccaatcatccgaccgtgatcctgaacttactcttgaaatttctcaagaccccgactttcgccgctattatgcaaacgctcgttttaaccttaataatgaagctaaacaattagcactgaataaagagtactctactctagtcgaagcttatagaactgataatgatcagaagcaccaaccatatgaactccatcaacctgttccactagatgcagctcctgtccctgacaatcgtcaacccgctcctggcattaaatttgttcccctaatgtatcactatggccacgttatccgtgacccttctgctctcgatgatagttcacaactatcgaacgatgaaacgctatcaatgactgaaccctctgctactgaatatggctaccctattgatatccgcatctatcagattatcgtccaacgataccctgaatatcttgctgttattcatgagtactgccgaccaattggtactgttaatgctacattccaagatttcaataaagaacagactccatctgctcctattgacttaacccgaaaagaagctgttctcgaacatatctttcgatttcttgatgtcaaaccctacctacctgtccactttgttgacactcagttttgcaagactcctctcgtcactggtactggttaccataatcgctattcttttaaacagaaagcgcatgcgaaatactcacaccctgatgagtatgctctcaatcccacttcaaaaggttacttttacaatgcaacctatgagaatgctcgcaccctggtacactatatcaagcaatatggtctcccatttaagcttgaattcgatcattctgattctgaccttaccgatgaacagatccaattctacatcgacaaagccaacgatttctttaatgattacccgacgttactattcactcgcaaccacatttcgaagcgtgatggtactttaaaagtacgacccgtctacgctgttgatgatttatttatcatcattgaacttatgctgacctttccgcttactgttcaagctcgaaaagcctcctgttgcataatgtacggtttagaaaccattcgtggttctaaccattacattgatcgcttagcgcgctcgtattcgaccttcttctcattagattggtccagttatgaccaacgacttcctcgagtcattactgacatttactacactgacttcctccgaagattaattgttattaataatggataccagcctacttacgaataccctgtctaccctgaccttgatgaccacaaaatgtatgataggatgaacaatcttttgtacttcctacacacttggtataataatatgacatttctgttacctgacggatatgcataccgccgaacccactgcggtgtaccatctggcctatacaatactcagtatttagattcatttggcaatctctttttaataattgacgccatgatggaatttggtttctttgattcagaaatcgaatctttcatcctcctaattttaggtgatgataatactggaatgactacgatctccattgatcggatatcattattcatcaattttcttgaaatatatgcaaaagaacgttataacatggtcctctcttcgaccaagtccgttctgactgcccttcgctcaaagattgaaaccttaggttaccaatgtaactatggttcacccaagcgtgacataaagaaacttgtcgcccaactctgttatccagaaaatggactcaagccacataccatgtctgcccgagcaattggcatagcatatgccgctgctggccaagatttcatgtttcactccttttgtcaggacgtgtataacatgtttatttcagattatagacctgatgctcgcatgaatctctatttccaacgtcagattttccacaatctcgaagatggattacctgatttatcgacatctactgtgccccgttttccctcattgtttgaaatccgtgaagcttactcccgttaccaaggaccgctcacctttactccaaaatggaatattgctcatttcatcaacgacccggattatacaccccccaactccaaaactatggctgactatgaatatgataatcgtatcactttcaaagttgcccctacttttgaaacggtagtgcctagcacaaaaagttttccgtga

SEQ ID NO: 1300 - DNA, 2130 bp, Erysiphe necator associated betapartitivirus 1
  source 1..2130: mol_type = other DNA
atggttctctcaccaatccgagattacttacatgaagctcaactacgcatcaaacaagaatggcaaaattttcaaaagtctgaatacacttccggctattctgaaaagtactccaccgatcacgacctacgtcgctactacgactctgctcgcaattatgacgccgaacatcacaaaactgacgaatacgaacataacttcgcacaaacattcgaacgctacacacacgcaaacgcaaaccgtaacgaaccctttgaattttatcgtcccttccttcctgatgaacctccacccaaccgcgtcccgcaacctggattaacaatcctaccttatcggtatcacaccggacaaatcgtccacatcacagatgaaatcccagaatctggcttttcacttcacccgcacattcaatacctccttgaccgcaagtactcacactacaaacagtacactaacaaatactgtcgcccacttggaacaactgacgcaacatttcacgatttcaatcgcgaacaagttgaaactcaacctatctcactcgaacgcaagcaattagttttacccctggtaaatcacttcctgaatgccctaccctaccttcctgtccactttgtcgacacacgattttgtaacacaccaagatctacaggcaccggctattttcaacgcttctcaacgttctttagaacccacgcttactacgcacacaacaagatttatcgtctacgcccaacatcaaaaggctatttcttcaacactgtttatgaattttcacgaacatggatgcaccacatcaaagaacacggattccccttcgtaccttccgatgactactctgacaacatcaaaaatcttcgcatcttcttccagaagcacgtaactatgctatttactcgcaaccacatctctgaccgagacggagcactcaaacaacgaccagtttacgcagctgatgattttttcatcctttgtgaactaatgctcacgtttcctctccacgtcatggcccgatatcctattaatggaatcaaatccgccataatgtacagctttgaaacaatacgtggctcaaaccactacctcgattcactcgctaagtcatttcaatctttcttcacaatagattggtcttccttcgaccagcgccttcctcgcgttatcactgacttatttttcactgacttcctccctggcctaatcgtcattaaccacggttaccaacctacctacgagtatcccacttaccccgatcttactgaacatgatatgtaccatagaatgtcaaatcttttacattttatacacacctggtacaataatatggtcttcgtcaccgctgacggattcgcatatctccgcttaacagcaggagtcccttccggcatactgaacacacagtatatagactcatggagcaatatgttcctactagtcgatggacttatcgaatatggatttacaaaatccaaaattctcgatattgtctttttcgttctaggagatgacaactctggctttacccagctcagtcatcatgaactctctgaatttttagaattctttgagacctacgccctccgccgctttaacatggttttatccaaaaccaaatcagtaattacaatcatgcgcaacaaaattgagaccctctcatatcaatgcaactttggcaaacctcgccgcccacttggcaagctagtcgcccaactttgttatcctgaacatggtccaaaagacaaatatatgtcttctcgcgctattggtatcgcttacgcagcagcaggcatggatcccgaattccatgaattctgtcatgatgtttacaacatcttcctcccgtacgcagcacccatcaacgatcatacaatcaacatggccctgaaacaccttcctggctattttaagatccttgactctctcgcaactgaaatatctttagaacactttccttcaatcgaagaagttctgaataaatattccaaatggcaaggctacctcaccgccgaaccaaaatggaactcttcccatttcaaatatcttcccgagaccgtacccaataactacaaaacaatgactcaatacgaacttgaacataacctccaacgtccaaaagtcacctatgttttctaa

SEQ ID NO: 1301 - DNA, 2106 bp, Erysiphe necator associated betapartitivirus 2
  source 1..2106: mol_type = other DNA
atgcttactcagatccgagactacttccacgaacgactcacgagactattatatgatcataaaatcttctcacaacaatccgaagaccccgatcaggctctccaccgtcaccaagactcagatatcgaacgcatctacaaatctattcactatgactttgcacgctccacagctcccactgattacgaagcacaataccaatcgatcaaacacatcctcgaagaaaaacaagctaaacaaggctttgactccgaattttatcgtcctcgcaccgatcctgtccccgacaatcgcgtccctcccactggcattgaccccctccccttcgaattcaaatcaatgaacgttgtcaccgcatccaccgaagttcctgaatctggatttcagatccatcctcgaatcgaacgacttctccgcgctaagtacccacagtacatgccattcgttagaaaatatacccgccccctcggcaccaccgacgccaccgtcagtgatttctttaagccacagactccctccccccccgttgaaaattcacgcatccaacatgtcatgacccacgttatgaagaagctcgctattacgcccttccttcctattcatttcgttgacactcaatatgacaaacgtccccttcacactggaactggttactacaatcgccgctcccacgaagcaaacgtccatgcaatcttttctcatccaaaagaatacgaagccaaacgcacatccaaaggttactttattaacgcctttctcgaatcagctcgatcccttgtccactggataaaatcaaccgctactccgtttcgacacgcgccctccgacctcgcatcctcactgagaactttctttcttcaacgtccaactatgcttttcactcgcaatcacatctccgaccgtgatggccacctcaaacaacgtcccgtttatgcagttgatgatctctttcttacaatagaatctatgctcaccttccctgctcacgttatcgcccgcaaacttgaatgctgtattatgtacggctttgaaactattcgtggttctaaccaaatactcgactacatggcccaatcctacaagtctttcttcacaattgactggtccggtttcgatcaacgccttccctggtgcatcgtcactcttttcttcacagaattgctaccccgattgctcgtcgtcaaccatggctacgctccaacgtatgagtacccctcataccctgacctcacaaccgagaaaatggtctcccgcctcactaatttgttaacattccttgctacatggtattttaacatggtctacattactgcagatggtttcccctatgtccgccgctttgctggtgtaccttctggtctccttaacactcagttcctcgactcattcggcaaccttttcctcatcatcgatggcctcatcgaattcggcttctccgacgctgaaatcgacgacctactcctatttattatgggtgatgataactccggtttcactctatggtcaattacacgcttagaaacattcctctcctggtttgaactctatgctctcaatcgttatggaatggtcctctccaagaccaaatctgtcattacagtcctccgcaacaaaattgaaactctatcttatacgtgtaattttggacaacctacccgccccatcggcaaactcgtcgctcagctctgctatccagagcgtggtccacgacccaaatacatgtctgctcgcgcagtcggcatggcctgggcctcgtgtgctcaagacaagacatttcacgacttctgtcgcgatgtctattacgagttcctcgatgaaagagaagaaatagacgaaagtgcatacctgcacattcagtctcatcttcctggcttcctcagaattgatgaatccgtccgacaagttattaactttcaggtcttcccctccttactaaccgtttcacaagcgattaaacaatggaaaggaccgctatcctaccaaccaaaatgggatttagctcactttgttaatcaaccagacgtcattcctcccgattctatcacactttatgaagtatggtccgaacgtaaattcgaccttccaattcttcgtaacctcttttag

SEQ ID NO: 1302 - DNA, 1866 bp, Heterobasidion partitivirus 17
  source 1..1866: mol_type = other DNA
atggagtacctcacttctctgctctcccgtgctttttccgcactttctgtgaccacaaactttcaaaatgttggttactccgagcacaaaccgagtattcccgacgttaactctgtcgcgattgaaaatcatcaacgcacactgcgatacgtgttccgctcttacctcagctcagacgagtacgatgccatcaccaatggatacaaacgtacctccctcgatcccgaaaccataaccgaagacttcttctccggcgacattcctgatcatcccgagcctcaagaccctcaagcccaactggctattcaaggagcactcctcgacatgtacgacgctttcaaaccgcctcagcccgctatgccctgtcacctttacgatattcaatggcattaccccttcaaatggcaagtaaatgctgaataccctttctctgttgtcaaaaagtttctcaaccttcgccaacacttcggtgatttttacgacttcgctacgaaatcgtggctacgctacgtcaatcccgcagacgctctccgccgctttggtcccgacccaagcccagccctcctcgaaacggttgtccccgcaaaatttggatacatgaagaatctcatcttctcatttgttcatagctggcaacacatcatcaaatcacgtttcacttcaaccgctggtttacgcgacaaagagtacatcaatctgcgctttttatttcctatgttactgcacatcaagactgctgtcgtcaaatttgacgcgccaaacaaactcagatctatctggggagtctcgaaactgtggatcatctcagaagcaatgctttactgggagtacatagcttggatcaaactcaatcccggcatcacaccgatgctctggggatatgaaaccttcaccggtggatggttccgattatatcgtgaccttcatcaacccggcgaatctgtttcctacataaccatcgactggtctcgcttcgacaagcgtgctagattttggcttatcaaaaagatctttgctgttgtccgcacattcctgacattcaacaatggctacgtcccaacccgcgactatccgtcttcacctacgctaccagacaaacttcaagccctatgggaatggacgatcgaagccttcttcgaatcaccaatcatcctacctgacggctcaatctggaaacgcatcttcgcaggcataccatctggactcttcatcacacaactcatggactcatgggttaactacgtcatgatttgcgccatcctacgctacctgggctacgaccctcgacaatgcatcatcaaagtgcaaggagacgactcaatcatccgactctacttccagataccttatcatgaacacaataactttttacttcgcatgcaacaagcagcggaatatctcttcggtaccatcatctctttcgagaaatccgaaatacgcaactcactcaatggttgtgaagttttgagctaccgcaacatcgaaggcctaccttaccgtgacctcatcaagatgttagctcagttctaccacactaaggcgaaagatccaacacccgccatcactatggcgcaagctatcggctttgcttacgcagccgtcggcaatgagtaccgcattcacaagctactcgaagatgtctatcaatattataaggatcaaggttacgaacctaatcccgcaggcatcaatatcgtgtttggagatagccctgaccggccgtattatccgatcgaacttgatcacttcccctcacaacaagaagtgcaacggttccttctcgcaactgactaccaagacgctttcactgacgaaaggacctggccccgcagccacttcctcttcgctccctgctcacgcacctag

SEQ ID NO: 1303 - DNA, 2169 bp, Heterobasidion partitivirus 2
  source 1..2169: mol_type = other DNA
atgtcgaccaaccctcctgaagtactccttcccttaccagaggtagatcccaacgccaacaatgttcgctacgcaaagctccttgaccaatatcgagctaacccttcgaactccaatcagaaactcctcctcgagtacgctgaacaacatggcttcaactacttcatcccaacggatgtcccacttcccgacgaccgcaaatccgctccaggtattctatccctagacggttttcgcttccacactgtcgcagctttccacagatatcaaaagatgtcacgctacggatacaacgcccttggctttatcttcaagcttattttgacgcttttcaacccatttctctggattctcaccgactattgtcgaccctccggctccgccgacgcagtattcgaaaacttcaaccaagaagtttcacctgtcgagcacgtcaacccttcccgcctcgcacaaattatgccactgattcaccacttcttcgcaatcaagcctttctgtccgatcgccttccctgacctccgcttttacaagtggtccctcgttacttccgccgactaccatgcccatcacagtaaagatcagcaagatgaatctgcccactactggaaacacctcaaagacagcgatctccttcaagatcgatttgactactccgatcgccctcgatccaaaggttatttcttcaacacagtcctactttctacacgtacaatcgttcacaacatcaagtatcactgtctacccttccaacgccataaaagagacacagactcctcagtccttcaaaaactctcattctggttcatgaaatatcccacagtcatgtatgtccgctcccaaatttccaagctttctaagctcaaagtcagacccgtctacaacgctcccttcctgttcattctcatcgaagcaatgctcacgcttgctctcatggcacaatgtcgccttcccgactcttgtctcatgtggggatttgaaacagtacgcggtggtatgcaagaactcaatcgtatatcatacaattatgacacttttatcatgattgactggtcccgatatgatcaacttctacctttcgctatcatttaccacttttggtgcactttccttccacaactcattcgtgttgacctcggctatatgcccacggaacaatacacagctacgcaacacaaacatgcgtttactgaaaaacacaatgaccagaaagaatccaatccggaatatgctactttcgcttcacgcctcaaaactcatgcacctcacattgttatgttttccttcatcattttcaacctcctcgccttcatttggctctggtacgtcaaaatggttttcgtcactcctgacggcttcggctacgtccgccttctcgctggtgtaccctctggaatattcatgacacaaatatgtgactcattctgtaacgctttccttctcatcgatgcaatgcttgaattcggtttcacacccgatgacatcaagctcatccgtatgttcattcaaggagatgacaatgtcatcttttaccttggtgatttcacccggatcttcgcattttatgaatggcttccagaatactgtcagcaacgctggcacatgactatctccgtcgataaatcaagtatcactcgtcttcgcaacaagattgaagtccttggttacaccaacctcaacggtatgccccatcgtgattgcgccaaactcattgccactctcgcttaccccgaaagatacgtacaagacaaaaccaagtacattgtgtttatgtcacgcgccatcggtatcgcttacgcgaacgctggacacgacagacaagtccatgacttgtgtcaacgtgcatatcttcaagcaagaaaagattcaggtctcagttatgatgaactcaaaaacatcaaaattgaataccagaaacttggcttctacgagattttctccgtcaatatcgaagaacttcgcgaacatctaatccaagatgtgtctgaattcccaaattttcatgacattcgtgataacctccgacactggcacggccctcacaccgtctatccaatgtggccccgccactttgatgatgacctcagctctattaagagcccacattccctaacaaccctgtatgatgttatgcagtctggtggtttgacatttgactacaacttttag

SEQ ID NO: 1304 - DNA, 2175 bp, Heterobasidion partitivirus 7
  source 1..2175: mol_type = other DNA
atgtcaaccaaccctcctattgttgaacagttagcaaacccaccgcaacctgaagacaagcacgttcaatacgccaagcttctcgacatctatcgcgccaatccaagctactacaaccaacaacagctcaaggaatacaccgaactttatggttttaactattttgttcccgtcccagaaaccgacttcccacccgaacgcaaaccctccaacggcctcttcgctcttgaaaattttcgctttcacgtacttccgtctttcactcgcttccgagacattccccgcactggttacaatcctctcagcttcataacatacatcctctaccgtatgttccctcagctcctcaatattcttgatgactactgccgtcccgcaggaaacatcgatgctatctttgaaaacttcaaccaagaagttacacccgtcgaagactgtgatcccgcacgcttgattcaaatcatgactctaatccactttttcatgcaaatcattccgttctcaccgatcgccttccccgacctacgtttctataaatggtctctcactacaagtgcagactatcactgtcaccactctcaagacatgaaacgcgaatcaaagtcatactggcaatatctaaaagatcacctcatgctagaagaacgtttcgactactccgaacgtccacgctccaaaggcttcttcttcaactctgtcttactcgcctctcgcacgattattcacaacatcaaatattatggcacccccttcaagccaaccaaaggccaagatgagccctctcgtctttccaaactcgcctactggttcatgaaatatccaactgtcctttatgtccgttcccaaatctccaaaatctccaaactcaagattcgtccagtctataacgctccgttccttttcattttacttgaagctatggttactttacctctcatggcaatgtgtcgcttacccggcaactgcattctatggggtttcgaaacaatccgtggcggtatgcaagaactcaaccgcttgtccttcgactttaccactttcattatgattgactggtctcgcttcgatcaacttgcccctttcgctatcatctaccacttctggtgtacttttctcccacaactcattcgagttgaccgcggctacatgcctcaaggagaatatacaacctcccgtcataaatctgcttttacagcaaaacatgacaatcacttcgaacacaacccaaagtaccactctttcgctacacgcctgctcaccaaatatccaccacatgttatcatgttcactttcgttatctttaacatcttgtccttcatctggctttggtatgctaaaatggtcttcgtcactcccgatggctacggtttcatccgtctcctcgctggtgtaccttccggtatattcatgacccagatcctcgattccttcgtaaatctattcctcttcattgatggtctactcgaattcggattctctctcgacgagattcgactcattagactcttcatccaaggagacgataatatcgccttcttcataggagatttcgaacgaattttcgcgttctacgaatggttcccagcttacgctctcaagcgctggcacatgatcatctccgttgataaaagctcaataacccgactccgtaaaaagatcgaagttcttggctacacaaacaacaacggcatgccctcacgtgacctgaaaaagctagtcgccaccctcgcctaccccgaacgatacgtcaccggccctcaatggtctgtaatccaaatgtcacgcgcaattggaattgcatacgcaaacgccgcccacgactcatccgttcatgatctctgccgtcgcgcctacaacgacgcccgcaagcattctggtctcactcacgatgaactcaagaacatcaaaattgaatatcagaagctcggcttctacgagatcttctccgtcaacctcgaagaactacagtctatacttgttcaggatttatcacaattccctgactactatgacatccgttccaaccttcgatattggcatggtcctcactccgtctacccgatgtggccttcccacttcgacgaccctctttcctctatacaggaacctgatgaccttatcactctacacacagtcctttctcacgctggtgttacgtttgatcgtaactattaa

SEQ ID NO: 1305 - DNA, 2115 bp, Heterobasidion partitivirus 8
  source 1..2115: mol_type = other DNA
atgttatccaaagtacgcgacttcttccacgagaaactatcccgtctcctactccaacattcgattttccaatcaaatgacaaagacgaagaacagactctcctcgaaaaccagtcctccgatgttaaacgcatctacaattcgatacactactccttccaaaccgatgacactcaagctgcatacgaagaccaatatcagcacatcaaacacgtcctcgaggacaaagatcgcctgtccaatttccccgcagaattctacctcccgtatgatactacgaccacccccgacaaccgcgtccctccttccggcattgatcagctcccttacgtctacaaacgcacaaacgtcgttaccgcaacagatgaagtacccgaaactggctatccaattcagaaccgcctcctaagactcattcgctcccgctacccccaatatcttccacacgttcgcacgttcacaagacccctcggtacaactgacgcaacagtctcagacttctttaaacctcaacatccctcacgactcgttgatccctcccgcatttcacacgttatgaaacacgtcatgaacaaaatggcaatcactccttacctcccaatccactttgtcgacacacaatacgacaaacgtcctctctcaactggtactggctactacaaccgccgctctcatgaagctaacatacacgctctctactcacaccccaaagaatacgaaaacaaacgtacatccaaaggctactacataaatgctttccttgaatccgctcgctcccttgttcactggatcaaatcctatggcaacccattccgctctaaaccagccgacccccgcgaatcactcaagaaattcttccttcaacgacccacaatgttatttacccgaaaccacatttccaaaatccttggtgccctcaaacaacgacccgtatacgcagttgatgacctcttcctcactctcgaatcaatggttaccttccccgctcacacaatcgctcgtaaaattgaatgctgcatcatgtatggctatgaaacaatccgtggctccaacgtccaactcgaccgcctcgctcaacgctacaattccttcttcacaatagactggtctggctttgatcaaagactcccttgggttatcgtccttctgtttttcacagaattcctaccacgccttctcgtaattaatcatggttatgcccccacgtacgacttcccgtcctaccccgacctcacaaccgaaatgatgtaccaacgcctctcgaatatcctctcgttcctggcaacatggtatttcaacatggttttcatcaccgcagatggattcgcatacgttcgccgcttcgctggtgtcccctccggactactgaacacgcaattcctcgattccttcggcaacctcttcctcatcatcgatgctctcatcgaatttggtgcacaagacgaagaaattgactccatcctcctcctcatcatgggcgatgacaactccggcttcacaatatggtcaatcgcaagactcgaacagttcatcactttccttgaatcctacgccctcacccgctatggcatggttatgtccaaaacgaaatcactcgttactgtacttcgacacaagatacaaactctttcttacacttgcaacttcggcagaccacttcgaccaatccctgagctagtcgcacatctggtttttccagaacgcgaatttaagcctcaattcatgtcagcacgcgctgttggtatggcctgggcctcctgtgctcaagataaaacctttcacgacttttgtcgcgatgtgttttatgaatacctcgaagaatccgttcccgtcgacaacacgaatatcgcctggatccagtcacatctacctggatacctccgcgttgatcctgaagttacgaagatgatagacctcaacgtctttccttcattccttcatgtgtctcagaaactatcccgatggcaaggacctctctcctaccaaccaaaatgggatttggcacatttcatcaaccaaccagacgtcattcctgacgactcgatcacaatgttcgaatatatgcaagaacactccctctctcttgacattcaattcgatctcttttcagcttaa

SEQ ID NO: 1306 - DNA, 2205 bp, Heterobasidion partitivirus P
  source 1..2205: mol_type = other DNA
atgcctcattatcagatccctccctacgacatccctcccgtcgtatcagacgtcaacttcgacactgagtctttccaacctcatgaaaaatatcgtgagcttcttgaaacttaccgtctatcctcaacagatggcaacctcaaggcaatccaagacttcgtatccgaatacgacttccaatatttcatgccgacaggtattgaaacacttcccgacaatcgtgtccccgcccctggaattcgcgctctcccccaatttcgcttccatccagtcgccgctctcaatcgattcagatctattccaagaactggcttcaacgccctatggacaatcgtcaacctactcgctacatcattcatgtcttatgtttatgttatctccgattactgccgacccgctggcaacatcgacgctatcttcgaaaacttcaaccaagctgtttcccccgtcaaagacgtaacttcccaacgtctcaatgaaatcatgatcctgatattccactttctgcccatcgtgccccatccaccggtcaatttccctgaccttcgcttctacaaatggtctctcgtcacttccgctgactaccatgcgcatcactcttccgacatgcaaaatgaaagcacacgttactggactcatctccgcgacacttctcaactcgaagatcgttttgactactccaagaatccccgatctaaaggcttcttcttcaattcgctccttcttcgctgccgtcgaatcgttcacaacattaaatatactggttggcctatcccccacgatccctcagaatcaaaaacttctttcctacaacgcatgttgtactggacactcatgaacccaactgtcatgtacgttcgatctcagatttccaaaatcacgaaattgaaagtccgtcccgtctacaatgcacctatgcttttccttatgcttgaagcaatgctcacccttggcctaatggctcagtgtcgtaaacccgacaactgtatcctctggtcctacgaaactattcgtggtggtatgcatgaacttcaccgcatttcgactgaattcaatgtctttatgggctttgactactctcgctttgatcaactcgctcccttcacaataatctatcatttttgggctaccttcattcccatgataatacgtgtcgaccgcggctatcaacaatcaacgatctatacaaaagatcaatacgcatatgatttcgaaaagaaatacgacaatctcgacaaatctgaacccaaatttcaagaatttgccaagaaatcaaacaacttgtttccaaaacacgtcgtcgctttctcattcgttatcttcaacatcctctccttcatctggtggtggtatgtattcatggtcttcatcactcctgatggctatggctacgttcgcctactcgctggtgtcccttccggcatcttcatgacccagatcctcgactccttcgttaacctcttcatcttcgtcgatgctctcctcgaatttggattttccatcgatcaaatcaagtgcttccgtctcttcattcaaggtgatgacaatctcgtcttctacctcggtgatctcacacgcatctttgacttttatgaatggtatccagaatacgcactcgaccgctggcacatgatcgtctctcccgacaaatcatggatcacgcgacttcgcacaaaaatcgaagtactcggttacacaaacgctaatggtatgcctcatcgcgatgtctccaaacttatcgctaccctggcttatccagaacgcaccatcctggacaagaatcgttatcctatccttatgtctcgcgccattggtatcgcttacgcaaacgctggtcacgaccacgccgtacatcaattatgctatcacgcttatctcgatgcacgtaagaaatccaatctctccgcctccgaactcaaagaaatcatcattccttaccagaaactcggtttctatgaaatattctccgttaacatcgaagaactgtttcccactctcgttcgcaacctggatcggtttcccaccttctacgaaattcgcgacaacctgtctaaatggcatggtccacacgacatctacccgatgtggcctctccaatttacagaccgtcccgacttcatcaatcctgacgaaactcctataactctctatgactttatgacaaaaatcaatcttcacattcctttgcatcatgacgttttatga

SEQ ID NO: 1307 - DNA, 1101 bp, Heterobasidion partitivirus P
  source 1..1101: mol_type = other DNA
tttcctatgcttctacacatcaaaactgctgtagtcaaattcgatgctcccaacaagctccgcaccatatggggtgtttccaaactctggatcatctccgaagctcaaatatactgggaatacatcgcatggatcaaactcaatcctggcatcacaccgatgctctggggttacgaaaccttcaccggcggatggttccgactctatcggactctccacactcccggcgaaaacgtcacctacatcacgattgattggtctcgatttgacaaacgcgcatacttctggctcatccggaagatattcatccgcacccggcaattctttgatttcgaaaacggctacactcctactaaggactacccctttagcccaacacatcccgacaagctccaagctctctgggaatggactatcgaagccttcttcgactccccgatcgtactaccaaacggacacgtctacaaacgccgtttcgctggcatcccatctggattattcatcactcaattgatggactcctggtacaactatgtcatgctatgctccatcttacactacatggacatcgatcccaaaacttgcattatcaaggtacaaggcgacgactcaatcatccgtcttgctatcctcatccccaaagatgagcatgataattttctcgctactatgcaaaccgtggctgaccacctattcggtgcaatcatctccatggacaagtctgaactacgcaactcaatcgaaaactgcgaagttctaagctatcgacactttatgggtctgccttaccgcgacctactcaagatgttggctcaattctatcacacgaaagcaagagatccgactcccgaaatcacaatggcccaagccgttggtttcgcctacgcagcttgcggtaacgactaccgtattcacgccttacttgaagacatctacatgttctacaagttacaaggctacgaacccaaccctgctggcatgagtctcgtatttggcaacagccctgaccggcctgaactgcctttcaactttgatcactttccttcccagaatgaagttcaacagtactttgtgtccctagactacaagaacgaacaacag

SEQ ID NO: 1308 - DNA, 2241 bp, Hop trefoil cryptic virus 2; identical to SEQ ID NO: 705
  source 1..2241: mol_type = other DNA

SEQ ID NO: 1309 - DNA, 1887 bp, Kalajoki betapartitivirus
  source 1..1887: mol_type = other DNA
atgtcatccaattctaatgagttttaccgaatcgttaagaatccgtctattccaccgaatagaagacctgcaagaggaattagaatattaaaagatattcgttttcatgaaaatgaaagaatattaaattctaaccctgagctgtccaaatatggaccacctcctatgaaaggagttgaacgcgtcttaaaagaggagtttcccacattgcatcattatttacaagaatattgtagaccaaaagctgatgctgatcctatttttgaagattttaaccttccacaagataaaacaaaaaaaattgagtccgatagattacaccaaatattcgatattatcgaaaactttgtacctattagaccgtatgacattgtacactggtgtgataccagattctatccgttcaacttagctagcaaagttgattattatcatattcataattctaaaagaaaacatgaagccgatcttaatcatcctgccgatgcttcgtctcgaactaagaaacactggtttgttaacacacacttatttcacgatcgacacatttgtcataacattaaactctatggatatccttttatcccctcacgagttgaaaagattaatgagcaaaagttatttgattggtttaaaaagcatcctactgaaatgctggttcgtagccacataagtaagttagataaacttaaagttagacccgtctataacgctccctttctattcattcgtttagaagttatgttagtttggccattattggctcaacttagacaagaacaatgtcagatcctatatggatatgaaactatccgtggtggaatgattgaacttaacagaatcgcaacgaactttcaaagctatttatgcattgattggagtcgtttcgaccacaacgcaccttttaatatcgtagacgttttatttgactattaccttccgagtaagatatgtacagattttggatacgctaaaacctataattaccaacagcatgcttttcatcaagccaagcatacaaccgttgatcctaattataattctagcaattcatccaaatttgtcgatgtttttcctgccaaagtgaaaaacttacttacctttctgaagaaatggtacaaagaaatgatttacattacgcctgatggctttgggtaccaacgtactacacaaggagttccttctggaattctatgtacccaatttttcgatagcatgattaattacattgttgtaattgattccatgttggagtttggatttactcctgtagaaataaaaacatttaaaatgttcgtccttggtgacgataacataataatgtttcctttcgaatatcacaaagcacagcaattctttgactttctaatatcttactctaaagatagatggaaaatgatcataaatgctgaaaaatcaaaatgtactaaccttcgccgcgatatcgaagtgttaggatataccaataatcagggtctcccgacccgtgacattggtaaacttgttgcacaactggcctatcctgagcgccactgtgattacaacgctatgattacaagatcaataggaatgtgttatgcatccgctgcttcacttccccttttccacgatctttgtttatctgtttacaagcactacctcaacaagattggcaacgagccatacaccccagtcatcaagggccttcctggacaactacaacacatgctaggattagacgaagtaccccttgaccatttcccgaccatcactgaaatttataatagagtttcaagctggaaaggacctcttaatttaataccgtattggaatccccaatattttcttgaaccaccttgggtcatacgagagcagtaccaaacattactgcgtacgcatgactcatag

SEQ ID NO: 1310 - DNA, 2148 bp, Lentinula edodes partitivirus 1
  source 1..2148: mol_type = other DNA
atggtttttcaacaaatccgtgacttcttatctgagcgaaagcttagaattcaagaggaatggagacgataccaaaaagctgtttcacgagacgacacagagctccgacaatcagatgcatcagacatccgacgaatgtacgaagccacacgtgatcaactcactgaacaagagaaagctgctgtattagaccgcgaatttcaaggtttaatcgactcaatgctgctaaagaatgagaacaagaaagaaaatttcgaattctcgtcaacctctgcttttgatggattcccccccaatcgagttcctatctcaggaatcgctggaatcccccgacgttttcacactggtcaaattgtatccgaaagcaatgaagtacccgaatctggatatccccttgataccctaatcgataccttgattactaacaagtaccccgagtacagatactacgttgacaagtacacacggccccttggtactaccgatgccacatttaaggatttcaataaagaacaagttcttattgagcccttagaccccgctcgaaaagagagagtaatgatgcacgttcacgaacggctcgctaccactccatacctacctatccactttgtagatactcaattttgtaaacttcctctccataccggaactggatattttcagagacactcattttggactcaaacccattctaaatactctagacccgaagagtaccatgaccgaccaacctccaaaggttacgtcatgaacgcttttcttattcttgcccgcactgctgtgcacaaaatcaaagtctccggcttgcccttcgatttcgattttgatgattttgaagatgataatgctgctttcaatgagctagcaaaatatctcgacaaattcctgaatgatcatgcaaccatgctgttcaccagaaaccacatttcacaaagagatggaaaactcaaacaacgacctgtttacgcagtcgatgaccttttcatccttattgaagcaatgcttacctttccactacttgtactggcacgcgaccctgcttgctgtattatgtatgggctcgaaactattcgaggatcaatgatctacattgaccaaatctcgcgaatgttcaactcatttgcaactatagattggtccgaatatgatcaacatgtacctagacccatcactgacgtctactactatgaatttctccccgatttgatcgtcattaatcatggctatcaaccaacctatgagtaccctacttaccccgaccttgatgagcacgcgatgtataaacgcatcgataatctcctctttttccttcacttttggtacaacaacatgacgttcgttaccgccgatggctatggctatcgtcgcaaacattgtggtgtaccctcaggcctgttcaacacacagtacctcgattcatttggtaacacataccttatcatcgatggtctctgcgaatttggctgttccgatgaagaaataagactattcctcatcttcgtaatgggcgacgataactccctgatgtcctattggacgcttgaaagattgatagcttttatccaattctttgaagcctacgcaaaaatgcgatacaatatgactctatccagaaccaagtccaccttgactgcagttcgatccaaaatcgaaatgcttggataccaatgcaactttggcagaccatcccgtcctatcggcaaactagtagctcagctttgctatccagagcgaggactattccgcaagtttatgtcctaccgcgctattggcgttgcttatgcctcagctggtattgatgtcaaattttacaaattctgtaaagacatctatttcacgtacctcccctatgctgtcgccgcgtccgaattcaacttccttcgtgctgcaactcacctccctggttatctcaaagcctttgacgatgtatccgactacattaatttcgagaagttccccactatctacgaaatccgagaagtctactcctattaccatggccctctatcctatgagcctaaatggaaccgagcacacttcattaaccgtcctaacattgtccccccttcagcgaagactgttggcgactatcgacgagagaacaatctccaacctcgacaagtcccaatccttccaactgactga

SEQ ID NO: 1311 - DNA, 765 bp, Plantago betapartitivirus
  source 1..765: mol_type = other DNA
cattgaactgatgttgaccttcccactcaccgttcaagctagaaagccatcttgttgcataatgtatggactcgaaaccatccgtggttcgaatcactacatagatcgcttagcgcgctcgtactccacctatttctcattagactggtccagctatgaccagcgtttaccacgcgtcattactgacattttctactctgattttctgagaagactgattgtcatcgaccaaggataccagcccacctatgaatacccgatctaccctgaccttgatgaacacaagatgttccgaagaatggataacctcctrttcttcctccacacttggtacaacaacatgaccttcttattacctgatggttatgcttaccgccgaacctcatgcggtgtaccttccggcctttacaacacccagtatctcgactcttttggcaatctatttctcattatagatgcaatgttcgagtttggtttcaacaacgttgaaatcaatggcttcattctcctaatactcggagatgataacactggtatgacgatcatacccatcgatcgcatcgccgatttcatcaactttcttgaaagatatgcgttggaacgctataacatggtcctctcatcgaccaagtccgttctgacatgcctacgctctaaaatccaaacgcttggataccaatgtaattttggaaatccaaaacgtgatatagaaaagctcgtggcccaactctgttatccagagaatggcttaaagcctcacacagt

SEQ ID NO: 1312 - DNA, 2193 bp, Quinoa-associated betapartitivirus 1
  source 1..2193: mol_type = other DNA
atgcctttcaatcctgttcgtaactacctagccgaacgacttgctcgtttaaaagaagaatggaaaatctttgagtcctctcatagagatccagaccttacgctagaaaagattcaagaccctgatgtccgccgccactactatcatgtcaaaactaaccaagaaattgagttgaaaacaaaaatgttcaaccaagagtattcaacccttgttgaaacataccgtcatcaaaatgatgaacgccatcaaccctacgagttacatcaacctatacctgctgatgccgctcctattccacagtctagacaaccggcccccggaatcaaattcgtccctttaatgtatcattatggacgtgtaattcttccgaatcctgatacctccatcgaacgcgactctttatccactactggagacattgactctggtgatccaatggatcctaccatatacaatctcctcgttaatagatatcctgaatatctatctatagttgataaatactgccgacctgctggaaccacggatgccacattccgtgattttaacaaagaacagatccccgttgatccaattgacccgaaaagaaaagagacaattttaacccttgtcaaacacttcttggatgtcaccccttatcaacctgttcattttgtcgacacccagtactgtaagactcctcttacaactggaactggctaccacaatcgatactccttcaaacagaaggctcatgctaagtactctcatcctcctgagtacgctaatcgccctacctcaaagggttatttctacaatgcaacctatgagaacgcccgcactctggtccacaagattaaagatacaggctttcccttcaacctgagctctaatgccactgaacatgaaataattgaccgcctcaataatttcttcaatgactacccaacacttctgtttacccgcaaccacatatctcaacgagacggtgtacttaaagtacgtcctgtctatgctgttgatgacctcttccttctgattgagttaatgcttacctttccattaaccatacaagcaagaaagccctcctgttgcatcatgtatggcttagaaacagtacgtggatcaaaccactacattgatttcatcgcccagaagtatactacttacttctcaatcgactggtcaaactatgaccaacgtttgcctcgcgttatcactgatatatactacactgacttcctacgaagcctcattgttattaatcaaggataccaagccacctatgaataccctgagtatccagatcttgatgaacataaattatataaaagaatggataatttactccattttctccacctatggtataataacatgaccttcctatctatggatggatatgcttaccgccgcacctattgcggagtaccctctggtttatataacacgcagtacctcgactctttcggcaacctatttataatggttgacgctatgctcgagttcggattcccaccctctaagattaaggaatttcttttcctaatcctcggagacgataatactgctatgacaatgatggacattcaacatgtcgatcctttcatcaaatacctcgagaagtatgcactaaagcgctataacatggtgctctcactatccaaatcactcttgaccactttacggtctaagattgaaacacttggttatcagtgcaactacggctctccaaaacgtgacgtttacaagctggcagctcaactctgctaccctgagcttggaatcaagccacatacaatggctgcacgtgcaattggaattgcctacgcttccgccggtcaagatgccacttttcactcattgtgtcaagatatttacaacatctaccgatctgcccaccgccctgaccctcgcactactctgtacctacatcgaaacgttttccacaacctcgaagaaggcctaccagacctcgagtcctcagaagctccactttttccctctctgtatgaaatcagacaacactactcccattaccaaggtccactgacctactccccaaaatggaattatgcccacttcatacatgacccggattttgtcgaacccctaccgaaaaccatggcacagtacgaaaaagaaaaccacatttcttctagaactgcccctacttttccaacggttgtgcccagcacaataatgtttccgtga

SEQ ID NO: 1313 - DNA, 2229 bp, Quinoa-associated betapartitivirus 2
  source 1..2229: mol_type = other DNA
atgcctttctcaagtgcacgtgactacctagctgaacgcatgattcgtgttaaacacgaaatgcaactttttcaagccgctcagtctgattcccaagtaattcttgaaacaactcaagaccctgacttccgaagatattacgacactgttcgttataatcctgagtatgaatatagatttcgtattcttaacaaagaatactcgaccctcgtcgaagcataccgagctgataacgcccataagcatcaaccgtatgaactacaccagcgcatcccacttaacgccgcccccacccctagttctcgcctccctgctaatggaataagactcatccccctgatgtatcactatggccacgttattcgtgatcccattgacaccctgttatctgattcgtttactttgtcacccgacacagacgaaacttgtgataatgcaattctccgttttggttatcctgttgatgatcgaatttaccgactcatcgctcgtagatacccgaaatatcttactgttatatcgacatactgccgtcccctcggtactgtcgaagcaacattctccgacttcaataaggaacagaccccatctgatcctattaatcatgaacgcaaagaacatgtccttaaacatgtattcaagttccttgatgcgaagccatacctcccattgcattttgttgatacccaacactgtaaaacaccccttgttacaggaaccggatatcacaatcgttactctttcaaacaaaaggctcatgccaagtactcacaccctaagcagtactcagagctcccttcatccaaaggatacttttacaacgccacctacgagaacgctcgtaccctggtacacatgatcaagaagcatggactaccatccagccttccatttgatccattgaaagacaatctcacagaagatcaaaatcagttatatatagataaactgaatgacttctttaacgactacccgacgttattgttcacccgcaaccacatttcccgccgtgatggtgttcttaaagttcgacctgtttacgccgttgatgacatatttatcattatcgagctaatgttgaccttccccctcactgttcaagcccgcaaggcctcgtgttgcattatgtacggactagaaaccattcgtggttctaatcactacattgaacgattggcccgttcgtattcgaccttcttctctttagactggtccagttatgatcagcgtctcccacgcgtcatcactgatatattttacactgacttccttcgaagcctaattgtaattaatcatggataccaaccgacctacgaataccccgtataccctgatctcgatgaacacagcctttattcaagaatggacaacctgctccatttcctacacctatggtacaacaacatgacattcgttttacctgatggttttgcttaccgccgaacctattgtggtgttccttctggcctgtataatactcagtacctcgattctttcggtaatctatttttgattatcgatgctatgattgagtttggtttcactgaccctgaaatcgatgacttcgtcttcctaatcctaggagatgataatactagtatgactacgatctcaattgatcgtatccaccaattcatcctgtttcttgagacatatgcgttacatagatacaacatggttttatccacgtccaaatctattttaacgacgctccgttcgaagatccaaacccttggttacacttgtaactatggatctcctattcgcgacattcccaagctagtcgcccaactttgttacccagagaatggcctcaagccgcacaccatgtccgcccgtgcaattggtatcgcgtacgccgccgctgctcaagactatgagttccactcgttttgccacgatgtgtacaacttatttttggaatattacgaacccgatgatcgcgcaaacctgtttctccaacgacagattttacataatctcgaagatggactaccagatctagcgacaccgactgtgccgttgttcccatcattctatcaagtgctagacgtatactcgtcttacaaaggcccactttcttacgatcctaaatggacgtatgctcactttatgaatgaccccgacaacgttccccctgctcacaaaactatgcgcatgtatgaactagctaatgacattcaagttcgacctgctcctacttttgtaacggtagtgcccagcacatag

SEQ ID NO: 1314 - DNA, 2238 bp, Red clover cryptic virus 2
  source 1..2238: mol_type = other DNA
atgccgttcaactctgctcgcaattatcttgcggaacgtatgattcgcaccaaacaagaacttatgacttaccagtcagaagatcacaatcccgatgctattcttgagaaatctcaagatccagattatcgtcgctactacgacaatactcgtttcgacccctctaatgaggtcaaacatcgcatccttaataaggaatactccacactagtagaagcttatcgtattaaaaacgatagaaaacaccagccttatgaattacatcagcctatccctgaagatgctgccccaattcctgaatctcgtgtcccagctcctggtctgaaacttgttcctttaatgtaccactatggtcatattgtccatgaccctgttgcttccgaatcagattccgatgatgataatactgcctccgaaaggccaagtaagacatcgatccctcattttggatatcccgttaataagcgcatctatgatgtaattgttaatgtataccctgaatatttaaaagtgattggtgaatactgccgcccaattggaactgttgaggctacttttgctgactttaacaaggaacagattccctctgcccctattaatattgaaaggaaagaacaagtgttaacccacatttttaaattcctagatgctcagccatacctcccgctccattttgttgatacccagttttgcaagacccctcttgttactggaaccggctatcataatcgctattcttttaaacagaaagcgcatgcgaaatattctcgccccgaagagtatgctaaactaccaacctctaaaggttatttttacaatgctacttatgagaatgctcgtaccctggtccatttcataaaacagtttggattaccattcaatctgcaatatgctcctgaagatgctgaccctaccgatgaacaggttcaatcctacatcgacactgctaatagcttctttaatgactatccgacgttattgttcactcgcaaccacatttctaaacgtgatggaactcttaaagtccgccccgtttatgctgttgatgatttatttatcatcattgaacttatgctgacatttccattgactgtacaagctcgcaaacagtcctgttgcattatgtatggtttagaaaccattcgtggttcaaaccattacattgaacgcttagctcgttcgtattcgacctacttctccctagattggtccagttatgaccaacgcttaccccgcgtcattactgatatttattacactgacttcctccgaagattaattgtaattaaccatggataccaaccgacctatgaataccccacctaccctgaccttgatgaacacaaactgtactctagaatgaataatcttttatactttcttcatacatggtacaataacatgactttcgttttatctgatggttatgcctaccgccgaacccattgcggtgtaccctctggtctgtacaatactcaataccttgattcttttggtaatctatttttaataatagatgccatgcttgaattcggtttcagtgaatctgaaatcgacaattttatcctccttgtattaggagatgataatactggtatgacggtcatatcaattgaccgaatctatgatttcatcaattttcttgaaaaatacgctttaatacgttacaacatggtcctatccccgaccaaatctgttttaactacattgcgctctaagatcgagaccctcggttaccaatgtaaccatggatcccctaagcgcgatatttccaagctcgttgcccaactctgttatccagagaatggccttaagccacatactatggctgctagagcaatcggaattgcgtacgccgctgctggccaagatccaatgtttcactcattttgccatgatgtgtataacttgtttaggttagattataaacctgatgctcgcactaacttgaatttccaacgccaaatttatcacaatcttgaagatggaattcctgatcttgcaacaccagttgtgccaccattcccttcattatatgaagtacgccatatgtactccaagtaccaaggcccactgtcgtatgctccaaaatggaactacgctcacttcatcaatgacccggatgttacgccaccctctcccaaaactatgcgtgactacgaaattgagaacgatctcatatctcgtactgcacctacttttgaaacggttgtgcccgccacaagaaatttcccgtga

SEQ ID NO: 1315 - DNA, 2271 bp, Rosellinia necatrix partitivirus 6
  source 1..2271: mol_type = other DNA
atgtcgtccgtattcaacaacgttcgcaactacctgcaagaaagactccaacacgttaaacgtgaatggcaaatctatcaagcaactggtgcttcctcttctaacatgaccgaagaacgcattcaacaacttcaagacctcgacacacgccgcatgttccacactgcacgtaacgcatttgacactacaaccaatactcctggccccgtctcccgcattactgaagaacaacgccgcctcatatatgacgccgaatctgacaagattatgaacgctctccgccaacatgacgaaatgcgatcccaaccattcgaactattcatgacccgtcctgactcagacccaatccctccgaaccgcatcgccgctcccggaatatggcaatcccctctccaattccacaccggacaaatcgtccacgccgatccttccactacgtctgtactccaccctgatgaacatgaagactacgctgaatcctatctccctggtgacactgaccaaggctatgaaatcgacccaactatctatgaattgcttacccgcaaatatcctgaataccttccttatgcacagcaatactgccgtcccaaaggcacaactgatggtacattccgtgactttaataaagaacaaaaaccatgtccccccctcgactctgatcgaaaagaacatgtcctcaaacacgtctttaaacgtctcgcaatcgacccctatcttcccctccactttgtcgacacgcaatactgcaaacttccccttgttacaggaactggctatcacaacagatactcctatagacagaaagctcacgcttccttttcacatcccctccagtatggctcccgccccacctccaaaggctatttctacaacgcaacttatgaaaacgcccgcacaatcattcacaatatcaaagaatccggtgttcctttcaacatccactttgctcctgaagacagagatatcactgatactgaaatcgatgaatatcgccgcaaatgcaacaacttcttcgaccaatatccgacactcctttttactagaaaccacatttccaacagagatggtactcttaaagtacgccctgtttacgccgtcgatgacatcttcatcattattgaagctatgctcaccttccctgcgctcgttcaagctcgcaaacccgactgctgcattatgtatggactcgaaacaattcgtggcgcaaaccacaaacttgactcactcgctcagtccttttctacttatttcacaattgactggtccggctatgaccaacgccttccccgcgctatcactgatttattttacaccgactttttacgtcgcctaattgtaatatctcatggctaccaacccacttatgaataccctacctaccccgatctaaatgaagacaacatgtatgaccgtatggacaagctcctcaaatggcttcacctatggtacaataacatgaccttcgtcactgccgatggctacgcctatcgccgcatgtacgctggtgtcccttctggactcttcaacacccaattcctcgattctttcgctaacctatatattctaatagatggcatgatcgaatttggcttcaccgacgaagagattgactcctttctcttattcgtcctaggtgatgacaattctggcatgaccaacctgtctctcgctcgccttcatgaattcattcaattccttgaagcctacgctctcactcgttatcacatggtcctctcccacacaaaatcagtcattaccgctctccgcaacaagatcgaatcgcttggttatcaatgtaactttggcctcccaaaacgtgacatcggtaaacttgtcgctcagcttatctatcctgaacacaagataaaataccacacaatgtccgcacgcgccattggacttgcctatgcctcctgtgcctatgacaagacattttataacttctgcaaatctatctataatatctttcttgactattatgagtatgatgagaaaactgctctcaacctgtcccgcttcctaaccactggacaagatgaccttaccacgcaattctcatggaaaatccttcctccattccctactagagaagaaatccgcaaacagatttccttctaccatggtccacttgactatgctccaaaatggaacttcgctcactttatcaacaagcctgatgttattcctccctcgtctaagacgatgtatgactatgaaatcgaacattcccttcgacctcagcctgctcctactttcgtcgcacgttaa

SEQ ID NO: 1316 - DNA, 2130 bp, Rosellinia necatrix virus 1
  source 1..2130: mol_type = other DNA
atggttctcaccatcatccgcgactatctacacgaggctcaactccgccttaagaaagaatggcaaacttttcagaaatctgatcaagaatcaggctactccgacaagcttccaaccgactacgaccttcgccgctactacgactccgcacgcgactacgacgctgaaaaacacaaaaccgaagaatatcaacacaacttcgccctgactcatgaacgctatacgcaaatgaacgctgaccgaaacgaacccttcgaattttaccgtccccttgaagacaacgaacttccagacatccgcttccctgcacctggcataaccgttcttcccttccgctaccacactggacaaatagttgaaacaactgacgaactccccgactccggtttctcactccatcctctcatcgattatctcaccaaaacgaaatggctacactatcgcccatacattgacaaatactgtcgacctcttggcacaactaacgctactttctccgactttaatcgcgaacagataccctccgcccctattgatgaaacacgcaagaacatggtccttccactcgttatctatttccttaacgctttaccttttcttcctattcactttgttgacacacgcttctgcggcacacccaaacataccgcaacaggatatttccaacgcttctcaacattcttcagaacccacgcttactacgcacgaaacaagctctacgctttaagacccacgtctaaaggctacttctttaacactgtttatgaattttcacgaacatggatgcatcacatcaaagaacatggctaccccttcgtcccttctcatgacgcactcgacaacgctcgacaataccgcatcttcatgcagaaacatgtaactatgctttttactcgtaatcacatctcagatcgagacggcttcctcaaacaacgccccgtctatgcagtcgatgactttttcattctctgtgaacttatgatctcattcccactacatgtgatggctagatacccaatcaatggaatcaaatcctgtattatgtacagcttcgaaacgatccgtggctcaaaccgctacctggactctatcgcaagagatttcatctccttcttcacgattgactggtcttccttcgaccaacgcgtcccccgtgtcataacagacattttctggaccgacttccttagacaacttattgtcatcaatcacggatatcaacctacttacgaataccccgcttatcccgacctttccgaacacgatctctacaaacgtatgaacaaccttcttcatttcttacatacctggtacaacaacatggtttttgtaacagctgatggttttgcatatcttcgatctgctgctggtgtcccctccggactactgaacactcagtatctcgattccttctgcaacctattcctcatcattgatggactatttgaatttggcttcacccaagctgaaatcctttcaatagttttcttcataatgggagacgacaactcaggtttcactatgatggacatcgaacgactaacccaattcattgagtttttcgaatcctacgcactcaaacggtacaacatggtcctttccaagaccaaatcggtgataactacactccgatcccgcatcgagaccctttcctaccaatgtaatggtggcaatcctaaacgcccacttggcaaattgattgctcaactctgttacccggaacacggtcccaaggacaaatacatgtccgcacgcgcaattggaatcgcctacgccgccgccgctatggatgaagaattccacgaattctgtcgtgatatctatcacacattcctgccctacgcagccccaatcgacgaacacacgctctcaatggcaaccaaacacctacctggttactttaagatgcttgataacatcgcttccgaaatcaaattcgactcatttccaaccctcgaaatggtacaagacaagtactctcgctggcaaggatacctatcccacaagccgaaatggaacgacgcacacttcaagtttctacccgagactgttcccaacaacatcaagactatgactgactatcaactcgaacacaaactggacacaccagtaccacattcgttattttga

SEQ ID NO: 1317 - DNA, 2241 bp, White clover cryptic virus 2
  source 1..2241: mol_type = other DNA
atgcctcacaactccactcgcaattatcttgcggaacgtatgattcgtactaaaagagaattaatgacttaccagtcaaaagaccgtgatcccgatgcaatccttgaagcctctcaagatcaagactaccgtcgtcattatgacaacgcccgctatgatccctcaaatgaggtgaaataccgcatccttaataaggaatactcaacactagttgaagcctatcgtttaagaaatgatagaaaacatcagccttatgaattacatcagcccatccctgaagatgccgctccaattcctaaatctcgtgttcctgctcctggtttgaaacttgttcctctcatgtaccattatggtcatgttgttcacgagcctgctcactctgatgaatccgattccgatgataactccgatgctccgactaggccagttaaagagtcagtccctcatttcggctaccctgttagcaaaaagatttttgatcttattgttagagtttatcctgaatacattaaggtgattaacacttactgtcgccctcttggaactgttgaagctacctttgctgattttaataaagaacagattccttctgctcctattaattctaagagaagagaaactgtgctcaagcacatattcaaattccttgatactcagccttatctcccgcttcacttcgttgatacacagtattgcaaaactccccttgttactggaactggttaccacaatcgctattctttcaaacagaaagcacatgcgaaatattctcatcctgaagaatatgcaaagatgcatacttcgaaaggctatttttacaacgccacttatgagaacgctcgcactctagtccactttattaagcagtttggattaccattcaatctgcaatatgcccctgaagacgctgacctcactgatgatcaggttcaatcctacattgatgctgccaacaacttcttcaacgactatccgacgttattgttcactcgcaaccacatttcaaaacgagacggtaccttaaaagttcgtcctgtttatgctgtagatgatatttttatcatcatcgaacttatgttgacatttccgttgactgttcaagctcgaaagcaatcgtgttgcattatgtatggtctcgaaaccattcgtggttccaaccattacattgaacgcctagctcgctcgtattcgaccttcttttcattagattggtccagctatgatcagcgcttacctcgcgtcataactgatatttattacactgacttcctccgaagcttaattgtaattaaccatggataccaaccgacctatgaataccctacttaccctgaccttgatgaacacaagatgtactctagaatagataatttattatactttcttcacacatggtacaacaatatgactttcgtcttatccgatggttatgcttaccgccgaacccattgcggtgtaccctctggcttgtacaacacacagtaccttgattcttttggtaatctatttttaataattgatgccatgcttgaatttggtttcagcgatgctgaaatcgacgattttatcctcctagttttaggagatgataatacaggtatgacggtcattcccattgaccggatttatgacttcatcaactttcttgaaaagtacgctttagtacgatataatatggtcctttccccgaccaaatccgtgctaactactttgcgctctaaaattgaaacccttggctacgaatgtaaccatggatcacctaagcgcgatatttccaagctcattgcccaactctgctatccagagaatggtcttaagccacatactatggctgcccgagcaattggaatagcgtatgccgctgctggccaagattttatgtttcactcattttgccatgatgtgtataacatatataggttagactacaaacctgatgcccgcactaatctcaacttccaacgccagatttaccataatcttgaagatggaattccagatcttgcaacatcagttgtgccaccattcccatcactatatgaagtacgccatatgtactctcaataccaaggccctttaacgtatgctccaaaatggaactacgctcacttcattaatgatccggatgatgtaccacccaatcccaaaactatgcgcgaatatgaaattgagaatgatctcatatctcgtactgcacctacttttgaaacggttgtgcctgccacaagaaatttcccgtga

SEQ ID NO: 1318 - DNA, 1428 bp, Beet cryptic virus 2; identical to SEQ ID NO: 627
  source 1..1428: mol_type = other DNA

SEQ ID NO: 1319 - DNA, 1437 bp, Beet cryptic virus 3; identical to SEQ ID NO: 629
  source 1..1437: mol_type = other DNA

SEQ ID NO: 1320 - DNA, 1440 bp, Brassica campestris chinensis cryptic virus 1
  source 1..1440: mol_type = other DNA
atggataagagcacaataaacataaacggttatgagttccgtgaattccaaggagaacttgaggatttaaatcaaactcattcagagcaaattagaagagagcccgaagtcacatacttcgatgaattcgcgaaagcagaattccttgatctttaccccgaatactacagacagtacgtcgaaggatggtcaagaagctactacatgcgttcaaaacacatggagtcgatcttcaaattctcaaaccaaaaccactctatcaatgagcttcaaccagaatcatggcagcacgccatcgaagccactagagatgggttatctatccttccacgtgtgagggcattatcagtcaaaacagaacttgaccaggtcaagtatatacagtcctccgccgcaggatacggttacataggtgcaaaaggtcctctttatggtgaaaaccacgatcgagcgatccgtagagccaaagctaccctatactccgcaacagcggaagatggacaaggtatcgattacgcgatcagggaatcagttcctgacgtgggctatacacgcactcagttggcagatctcactgagaaaacgaaagtcagaggtgtttggggaagagcattccactacattttacttgaaggcacatcagctagacctcttatagaggcaattcaagaaggacaatcgttcatcatgataggcagtgatccgatcgtcaacgtaccatacgtcttaacagaaacaaaagcactgtgcaaatggttaatgtcacttgactggagctcattcgacgcaacagttaacagatttgaaatcaatgcagcattcgacttaatgaaagaacacttagtcttcccggactttgatactgaaatggcatacgaactatgtcgtcagattttcacacacaagaaagtcgcagcgcctgatggtaagatatattggtcacacaaaggaattccttctggcagttacttcacgtcacttgtcggttctatagtcaataaactcagagttgagtatttatggcatctcaaattcggacgtagtccaaaagtcacattcaccttaggtgatgactcccttatcggagacgaccactactaccccccggatgagttagctgataaagcttacaacttaggttggctagtgaatccagacaaaactgagtactctacgttaccaggaagcataacattcttaggaagatcagttcttggctccgttaatcaacgtgagttaaagaagtgtatacagcttctattactaccagagttcccagttgaatcaggagaaatttcagcctttagagcagcagcaatcgcaaacgatgccggtggcaacagtgaaatgttgaaccgagtcgctcgtaggctcaaacgcaagtacggaatcgcggaaacgcatcaagtacctttgtattttagacgttatcaaccataa

SEQ ID NO: 1321 - DNA, 1434 bp, Camellia oleifera cryptic virus 1
  source 1..1434: mol_type = other DNA
atggatcaccaattcagaggagagcgacaagctcttattgaacttgcagcaatcccggagaggcgatcgcgtgaagtgtacaaggtcatagttgatcgctacgctgctgaagctataaggatttacgtaccttacacttttcgccaagagcttgaggggtgggctaggagttattactctctacagcaacatgtcgatgcaatactcgcgtatcagcgtcaaaagttgccggaacctaccgatgatgcttggaatcaaaccaagcagcatgtccttacagagttcagaaggatggatcagatcgacccgatttcgtatatgcgattcgacgatgttaagtggattcaatcctctgccgcaggttatggttatattggtcgcaaaggcgatgatgataactattcaaaagccaaacggactgctgtgactattgcagaagcactagaccatgacaggaactatggacccaaagctttacttgactcgacaccagatgttgcattcactcgaacacaattatcacaaattaaggtgaagagcaaagttcgaaaggtatggggtgaagcatttcattacgtccttttagaagggctatttgctgatccgctaatcaggttctttaaaggaatagattcattctattttataggagaagatccgttgttagcagtacctgcgttgatcgaggagataataagggcaaaagactatgtctacatgttcgactggtctggctttgatgcctcagtacaggaatgggagattaggttcgcctttctgtgtttggagtctttattacgtttcccgtcaaacgtagaggcccaaatttggcgtttcttaattgagctgttcatatatcgaaagattgccggacccaacaatgtattgtacttgaaaactcagggcataccgtcaggcagttgttttaccaatatcattggaagcatcacgaactatgttcgtatccaatatatgtttaagcggttaacaaatcgcttcgtgctcgtgtttacgcacggagacgatagtctcacgggcgttgagacaactcaattcatccaaatggacgctttcaacagtatctgtgaaccattacagtggaagatcaatattgacaaatctgaagtatccagaaagaaccagaatgcatcgttcctcagccgcacagtcaaggagtatcagaatactcgcaatgaactggcctgtttaaggatgttaatgtatccggaatatgaagtgacaactggagatatttctgctttgagagcaaagagtatctgtcgcgacgccggaatcaactcccgttatctgtttgaaatatttatgtatctcaaagggaaatacggtttagctgagtcccttccctttcatttgaaagtttgggacccaaccgaatttgagccacgaccagtgtctgcttctgaaattatgtaa

SEQ ID NO: 1322 - DNA, 1431 bp, Cinnamomum chago deltapartitivirus 1
  source 1..1431: mol_type = other DNA
atgttacgcaacattagagaatatgagttcctcgagtttaccaatgaattggaagacttaggacaatatcatattcatcaagtccggcgggaaccgggcgttacttatcgtgacgaattcgcattacgcgaactaaacgatttgtatccgcgactgtatgaacaatggttacaaggatggtctagaagtttctacacaggagaagatcacatgaaagctattttacagtacgcgcatccaaacacaccaatcgaacgtttagacgatcgcatatatcagcttgcgatgtccaacgttttagaaaggttaagtagccttccaagtgtgagggcattcgatgttaagtcacaactcgacttgatacattatgaaccgtcatcggcggcaggttacgactatattggtgcgaagggacctattcttgatgcaaatcatgaaagggcaattcgacgcgctaaagcagtgttatggtctgcaatcgctccagatggagaaggaatggatcatgttatcaggacttcagttcctgacgttggatacactcgcacacaattgactgacttaggtgaaaagaccaaagtgagaggcgtatggggcagagctttccactacattttgttagagggaacagcagctaatccgctattagaggccttcaaacaaggagggactttctttcacataggacaagatcccagagtcagcgtaccaatggtactgtcagaaatttcaagaaattgccaatggttgttagcattagattggaaatcattcgatgccaccatcagcagatttgaaattcatgcagcttttgatattcttaagcagaaagtagactttccgaactacgaaacggagcaatgtttcgaaatttgtcggcaactcttcattcataagaagatcgctgcaccagacagcaaaatctattggtcacataaaggattaccatcaggtagctactacacttcgataattggatcgatcgtcaatcgactccgaatcgagtatatttggctaacaatgaaaggcagaagtccgcaaatgtgttacacacaaggcgatgactctatcattggcgaagatcaatttattgatcccgtagaattagctaaagtagctgaaccacttggctggcttatcaacccagcgaagactgagacctcaaggttaccggagtatgtcactttcctaggcagaacaagctatggaggacttaatcaaagagatttaaagagatgcattcgcctcttaatcttcccggaatatccagtggaatcaggaagtatttccgcttttcgcgcagcttcaatcgctcaagatgcaggcaacaccagcagagtattgaacgacgtcgcgaaacgactaagacgccattacggtatggcttcacccgaagatgtacccaagcagtttagattatatataccttaa

SEQ ID NO: 1323 - DNA, 1419 bp, Cinnamomum chago deltapartitivirus 2
  source 1..1419: mol_type = other DNA
atggcacaaccgtacgattttatggattttcaagcagagctcgaaaacataaatcaacggcatttccacagggtattcaggccggagcacactatagaacgtgacaaatatgctcttcacgaattactcgctgtggatcccttagctgaggaacaatacctagaaggttgggcccggagttactactcaggacaacagcacttagaggcaattttccaatatgctcatgaggacattccactttctgccttgcatcaacaaacatggaccgatgctattcaggcaataagaacggaattgcgtagccttccgcgtgtgagggcattcagcgttctaacagagttagaccagattgattttcaagcccaaactgcagcaggttatgactaccaaggcgtaaaaggtgacaaagatggcgaaaatcatcgacgtgctataagccgcgcaaaagcgactctttggtcggcgttaaacccgagcgaaggcatggaccacgttataaggactcacgtcccggacgttggatacacccgtacgcaacttaccaacttagcagaaaagctcaaagtcagaggagtttggggaagagcattccactatatccttcttgaaggcacagctgctaatccactgatacagatgtttcagactcaacagtcgttcttccatatcggaatggatccaacggtaagtgtaccgagactactgtcgtatgtcaaaagtaaagccaaatggctaatcgccctcgattggcaggctttcgacgcgtcagtgaatcgttttgaaattgatcaaggctttgatttactcaaagagctagttttctttcccgacccggaaacagagaccgcttttgaaatcagccgacaactgttcaagcacaagaagatcgctgcgccagacggcaatacgtactggtctcacaaaggattaccatccggaagctattataccatgcttattggttcgatcgtcaacagactccgaatcgaatatttatggcgagtgacacaaggtcatggaccgatagtctgcttcacgcaaggagatgactctcttagcggcgacaacagcctcatcaatccagaagacttcgctcaagttagcggacctttaggatggacgatgaatcccgcaaagacggagatatcgaccattcccgagagcgttacctttctaggacgctcctcatcaggaggtctcaaccaacgtgacatcatcaagtgtcttaggttattaatttaccctgaggtacctgtcacgtccggtgacatatccgcctttcgagcaacttcgatcgctcaagacgtaggaggaacaagttcacgtctgaacgaagtagcacgaaagctacgtcgcaaatatgggatagctgaagaatctaaagttccaagagatcttagaagatacttcgcttga

SEQ ID NO: 1324 - DNA, 1452 bp, Conifer deltapartitivirus
  source 1..1452: mol_type = other DNA
ttgtttagatcccttgcatcgtgcgtttacaagatggatcatcgctaccgaggcgcgactacaggactcattgagcttggagcagtttcagagcggagatcaagagaagaatgtgagatactagtagatcaatactccaaagaagctattgaccactttgtaccttacacacttcgaagagagcttatcgggtgggcaagaagttattacactcttgaaggacatatggcagcaatcatgaagtatgatcgccccaagattcctgaacccaaggaccagacttggaatcaagtcaaacaaatggtcttgacagaagcaagaagatggccaaaagtacgctgtaagtcgtacctcaactttgatgaagttaagtggctaagatcttctgccgcaggttatggatacgttggactcaaaggagacagcgagaattattccattgccaagagaaccgccgtgacaattgctgagcgattgaatcatgacagatcttatggccccgaagccctagaaaactcgacacctgacattgcgttcaccagaacacaattgtctttgataaaggtgaagagaaaagtacggaacgtatggggagaagcatttcattatgtccttttagaaggcttatttgcagatccacttatagagtatttcattgagaaccgagcattttattttatcggtcgaaatcctctgctagcagttccagcacttattgaagaaatattgtcagaatcagactacatctacatgtttgattggtctgcattcgacgcatctgtccaggaatgggaaatcaggttcgccttcgagatactcgaaacaatacttattttcacttcaagtgttgaagaacaagtctggcgcttcctaattgagttattcatttatagaaagattgcctgtccggatgggacattgctcatcaaaacgatggggataccctcaggtagttgcttcaccaacatgattggtagcatcacgaactatgttcgtattcagtacatatttatgaagttgacctcaaatccagttactgcattcacccatggtgatgatagtttagctggcgtcaacgctactcagtacattcaaatggatacaatcagtgcattttgcagccagttcttgtgggagctaaacgcctcaaaatccgatgtatcaaataagcttgagaatatttcattcctcagccgcacagtccgcgaaggtcagaatgcgagagatgaactactctgcttaagaatgttacaataccccgaatatccagtgcaagatggatcaatttctgctctcagagccgagtcgatttatcaggatagcggagtgacttcccagtacctacctcagatttctatatttctgatgagaaagtacggtaaagcacaaaacctaccgcgcgagctagcccggtgggaccttattcagtatgagatgcttagagcatctgca

SEQ ID NO: 1325 - DNA, 1140 bp, Dactylorhiza hatagirea deltapartitivirus
  source 1..1140: mol_type = other DNA
gcgatccagaatgagttacgtagccttccaaacgcggaggcattcgatgttctatctgaactagataaaatacattatgaacaagcctcatcggcaggttacgactatataggcgtcaaaggacctatacaaggggacaaccacaagagagctattcatagagcaagagctacactttggtcaacaattcgcgaccgcgaaggaggaccaaaatatgtcattgaacaatcagttccagacatcggttacacctgcactcagttaacaaatctcactgagaagacaaaagtcagaggagtatggggacgagctttccattacattctgttagagggcacatcagcaagaccattgctagatatgtttacacataacaagactttcttccatataggtgaagatccaatactgagcgtaccaagattactttccgaggtaagcaagacatgcaaatggctatacgccctagattggtcatcattcgatgcaacaacgagcacgtttgaaatcaacacagcatttaacttactaaaagaaaaggttcagtttccaaactatgaaacagaacaagcatttgagctaagcagacaactcttcattcacaagaagatcgcagcgcccgacggctttacatactggtcacacaaaggaataccatccggaagttactttacttcgatcataggttcaatcattaacagattgaggatcgagtatttatggcgacttataaccggtcgagcacccaaaatatgctacacgcatggagacgattcattaatcggagacgatacacttatcaaacccgaagatctcgcttcagcagcacaaccgctcaactggattataaatccaaataaaacagagtactctacttcacccgaattcgttaccttcttaggaagaacgaccaaaggcggattcaattcaagagaaatcgatcgcgcattgcgccttctgatatttcctgaatatccggtagagaccggcgacatttcgacctatagagcagaatccatcgctcaagattgtggcaacatgagtcaaatcattaacataatcgcaaataggttacgacgaacttatggaattgcacaaacagacaaagtgccgaaacactttctccgctacatcccttaa

SEQ ID NO: 1326 - DNA, 1419 bp, Fig cryptic virus; identical to SEQ ID NO: 618
  source 1..1419: mol_type = other DNA

SEQ ID NO: 1327 - DNA, 1434 bp, Japanese plum-yew deltapartitivirus
  source 1..1434: mol_type = other DNA
atggagcatcgctttaggaaggagcgcacaggtctcatagagatcggcactgtttcccagagggatacacgaaaagagttcgagatcatagtagatcaatttgcagccgaagcaattgacgccgtggtcacaccgactctaattagagagctagatggatgggcaagaagtttttacactcttgaaggacacatgaatgcgattatgaagtataatcgaatcaaaacccctgaacccacggatgacgcgtggaaccgcacaaagcagttctgccggacattattccacagttggcccaaagtgacagcattgtcgtacacaaatttcgacgccgtcaaatgggtgcatgcatcagcagccggatatggttacgcaggatcaaaaggtgaaaatgataattatcacaaagccaagaagaccgctatcacaatttcagagaaattgaatcatgaccgcagctacggaccgacagccctccaaaactctacaccagacattgctttcaccagaacgcaattgtcacaaattaaggtgaagagaaaagtaaggaacgtttggggcgaagcatttcattatgtcctgttagaaggactatttgctgacccgttgattgaattcttcaagaattccaacaccttctattttattggaaggaatcccctgttatcagttcctgctcttatacaagaagtattgacctactacgactatgtctacatgtttgattggtcggcatttgattcgtcagtacaggaatgggaaatccgtttcgcctttgagcttctaagctcgatcttgttattcccgactccggtcgaagagcagatctggcgtttcgtcactgaactattcatatatcgcaagattgcttgcccagattcaactttgttcataaagacaatcgggataccatcaggcagctgctttaccaacatcattggaagcatcgcgaactttgttcgtatccagtatatatttatcaagttaacgtctaagcctgcgcgcgtctacacacatggagacgacagcctcgcagcggttaacgcagatcagtacattccgattcaaaacatcaagattctttgcgactcattaacttgggagctgaatgcaacgaaatcagatgtctcgaaccaggcagaaggagtaaacttcctcagcagaacagtccgcgaaggacagaatgcgagagatgagctcaccgccctaagaatggccaaatatccagagtaccccgtgcttgaaggatcgatctcaaccatcagagttgaagcgatcaatttagactccggattgacttcccagcaacttttcaaagtttttcaataccttgagaggaaatatggaaaagcaccgaacctaccgagagaactttctcgatgggatccagtagagcatgagagccttaggttatcttatgactcattaatgtaa

SEQ ID NO: 1328 - DNA, 1434 bp, Medicago sativa deltapartitivirus 1
  source 1..1434: mol_type = other DNA
atggtactgaacgcattacatgattatgatttcctcgatttcagaagtgaagttgaaaggacgagtcataagcattcacacggtgtacggcgagagccatataccacagaagttgataggtgggcgaaaggcttacttatgaacttacactcagagctgtataagcaaagcatcgaaggatggtcgagaagttattacgacccggctagacatttagaagcaatttataattatgcagcacctgacattcccttgacaaacatagattggcaattgtacacagattgtgcattgaccattagacaagggttttatagccttccacgcgtgaaggcgtacgatgtacgaacagaactcgacaaagtttcgtacaaagcctcatcggcggctggctatagttatcagtgtgtgaaaggacctgttggaggccccaccttcaaactagccgtccggagagcacgaaaagttgtcggagaagtacatgaacagggagtacctggcatgaagcatcttatagagacaatggtgcctgacatcggacacacacgcacacagctaaccaatttattggagaagaccaaagttagaaatgtatggggaagagcattccagtacattcttattgaagggacagtcgcggatccactgatccggatgttctcagaaagtaagacattctaccatattggacgagacccattggatagcgtcccagaagttatttcagaagcagcagcagcaggaaagtggctatacgccatagactggaaacagtttgatgctaccgttagcaaatacgaaatagtaacagcattcgaattgattcggaacttaattgactttccgaatgagcaaacacaagttgcattcgaaatcagcaagcaactcttcattcataagaagatcgccgcgcctgatggctgggtttactgggtacacaaaggaataccatctggtagttactttacatcaataatcggatcgattgttaatcggctgagaattgagtatttgtggcgaaagatcactggacacggaccgaaagtttgtttcactcaaggagatgattctctatcgagtgatgaccaattcatcccaccagaaagattcgccgaagtagcttatccaattggctggatcatcaatccagacaaaacggagtattcaacggttccaggagaagtttctttccttggaaggacaatgatcggaggatcaaacgtacgagatacactaaagtgtatcagattactgatgtttccggaatatccggttgaatcaccacagatttccgcttacagagctcaatcgattgcagaagatgcaggaggaaggagcgctatactcaacgagatagctagtaagctaaagactgattacggagtcgcacaggagcacgaggttccggcgcatttcaaacgttatgttatgtaa

SEQ ID NO: 1329 - DNA, 1440 bp, Pepper cryptic virus 1; identical to SEQ ID NO: 625
  source 1..1440: mol_type = other DNA

SEQ ID NO: 1330 - DNA, 1437 bp, Pepper cryptic virus 2; identical to SEQ ID NO: 623
  source 1..1437: mol_type = other DNA

SEQ ID NO: 1331 - DNA, 1428 bp, Plant associated deltapartitivirus 1
  source 1..1428: mol_type = other DNA
atgagaacaatcacacactacgagtttactaatttctctcaagactttgaagaaactggtaagactcacacacacgcggtcaggagagatcctgaggttacttatgaagacacttttgcaatgaaagtgttaatgaacaagtatcccgcattgtatgataacatcatcagaggatggtcaagaagctattactccggtgaagcacacatgaaagctatcatgcagtacgccacacccaacacaaactatgaacagtgcaacaagaaagcttatgagcaagcagttgcgaacgttcaagaaagtttacgtagccttccgactgtgagggcattcaatgtaatgaatgagctagatcttgttccttatgaatcgtcttctgcggcgggtttcgactatattagcgtgaaaggtcccactgaaggtgaaaatcacataagggcgatcaaaagagccaaagcaacactgatgtcagcaatcgctgatgacggagaaggtatcgaacataccatagaaacttacgttgccgacgttggctatacacgcacacagcttactgatcttcgagagaagatgaaagtgagaggagtatggggcagagctttccactatattttattggaaggaacttcagcatcaccattgttagaagcctttgctaaatccaacacattcttccacattggaaaagacccaacagttagcgtaccgaatcttctatcttacaccaaatcgcaagcgagatggttaacagcaatcgactggagagcatttgatgccacagtaagtagatttgaaatcaatcatgcttttaacataattaagaagtgtatatcatttcctaattttgaaaccgaacaagcatttgagttatcaagactactctttacacacaagaagctggcagctccagatggcaagatttactggatacataaaggtatcccatcaggaagttatttcacatcaattattggttcaatcgttaatcggctgagaatcgaatatttatggttacttcaatacaacagaagtcctaaaacatgtttcacccaaggcgatgactcattaattggagatgacgaactgtttagtcctatggacatgtcatacctcgtcaatcatttgaattggtggattaacccaacaaaatccatgacctcaaagattatagaggaaattacattcctaggccggtcaagtttaggtggcttaaatcaaagagatttgaagcgctgcctccgattactaatgcttccagagtaccctgttacttctggtgcaatatctgcatatcgggctaactctatttggagagactcaggctcaacgagtcaaattctcctagagatagcgactacacttcgaaggaagtatggaatcgcatcacgagaccaagttccaaggtatttacgaccatggaaagcttga

SEQ ID NO: 1332 - DNA, 1440 bp, Plant associated deltapartitivirus 2
  source 1..1440: mol_type = other DNA
atggacaagagtacaatcaatttgaatggttatgaatttaagcagttttcatcagaacttgaagatttgcatcaaaatcattcagaagaagttaggcgtatgcctaacatcacattatacgatcaatttgctctcgatgagcttagtgatctatatccgcaactttatgagcaatggatctttcaatggtctagaagctattacacttcagataaacatcttgaagctgtcatgaagtatgcgaatcaaaacatccctatcaaccggctcaatcaagacgtttggacacaagcagtcgatgccgttagagatgggttacgtaacctccaacgtgtgagggcgctatcagtcaagaccgaacttgacatagttaaatacatccaatcctcatcagcaggttacggttatatcggtgcgaaagggcctctcagagaattcaaccatatgagagcaatcaaacgagccttagcaactctatattcagcgaccgctgcagatggagaaggaccagattacgctatccgcgaatcggttccagacgtaggctacacgcgcacacagttaacagatctcactgaaaagacgaagatcagaagtgtttggggacgcagtttccattacattctgctcgaagggacttcagcaaaacctctacttgagggattgatgacaaacccaacgttcatccagataggcagtgatccgatctttaacgtaccagctaaattatccgaactacatgaaaagttcaagtggttatattcagttgactggagcacatttgatgcaacagttcatcgttttgaaattaacacagcctttgatttaatcaaagagcgccttttctttccggacttcgatacagagatggctttcgaattaagtcgtcaactcttcattcacaagaagatcgcagccccagacggtaaaatatactggtcacacaagggaattccttcaggaagctactttacgtcaattattggctcaatagtcaatcgattacgcatggagtatctatggagactcaaatacggacgtggtccaggttgttgttataccttaggtgatgattcacttataggagacgatctttactacaatccacaggagttatccgataccgcaatgcaatacggttggattattaatccagataagaccgagtgctcaacaaatccaggagctatcacattcttaggcagaacatcagttggtggacaaaatcaacgagatctgaaaagatgcgtgagacttctacttttaccagagtacccagtagcaagtggagacatttctgcgtttagagcaaaagcaattgctcaagatgctggtggcaacagcgaagtgctgaaccgcatagcaaaacgcttgaaacaaaagtatggaatagctgacgaatcagttgtacctagttattttagagtttatcaaccttaa

SEQ ID NO: 1333 - DNA, 1431 bp, Plant associated deltapartitivirus 3
  source 1..1431: mol_type = other DNA
atgttaagagatatacgtgattaccagttcacagagttcacccaagaacttgaagagcttccaggagatcacccacatatcatcaggcgagagcctgagcaagtcatcacggataactacgcgttagctatccttaatgacgcatacccaacgctatatgagcaatctttacaaggatgggctcgaagttactatacccaagaagggcatatgaacacaattatggcgtatgcaacaccagacacaccatactcagcagtaaaccatgagctttatcaacaagcatttgatgctgtacagaatgagttatgtagccttccgcttacgagggcattcaacgttcttacggatctagacaagattcgatacgagcaatcctcttccgcaggctacaactatatcggaccgaaaggccctatagatggtgataatcacaaacgtgcaatccgctcagcggtcgcatgtatgtggtcagcgttgcgagacacagatggaggtccagcgtactttctaacccagtcagtaccagacgttggatacacccgcacacagttagcagatctcagtgtcaaaacgaaagtcagaggagtatggggccgagcgttccattacatcctattagaaggcacagcagcaagaccgctgttagatgcttttatagaaggcaagacgtttctccacatcggagaagatccgcaacacagcgtaccagacatactgtcaaatgtaagtcgccatgcaaaatggctttatgcattagattggtcaggtttcgatactagcgtaagtcgatttgaaatagagcacgcctttaagttacttaaggcaagaattctctttccaaacaatgagactgaacaagtatatgaacttagtcgacttcttttcacccataagaagatcgcagcaccagacggtaaaatttactggtcacacagaggaataccatcaggtagtttctataccacaatgataggatctattatcaatagacttagagtggaatatatatggagacaaatcaaaggacgaggcccaaagctttgttatacacaaggagatgattctctcatcggagacgacgagttaatacacccacgtgatatggcagcagtggcagcaccactcggctggacgattaataccgacaagaccgcgttttctacaagcccagagtttgtaacctttctaggtaggacaacatacggaggattcaaccagcgagagcttatgcgttgtattcgactattagtgtttccggaacacccagttgagtcaggaagtatttccgctttcagagcacgcgcaatcaatcaagatagtggtcacactagcgagattatacgcacagtagctgaaagattaagacgtttatatggaataccaagcgataaagatgtacccgcacattttcgtcgttattatgcctaa

SEQ ID NO: 1334 - DNA, 1423 bp, Plant associated deltapartitivirus 4
  source 1..1423: mol_type = other DNA
atggcagctacaaacattaacattcgtgactttgttttcacagactttcaatcagaacttgaatgcacaaatcaaagacatcacgaaggagtaggacgagagtctgaaacaatctatgaagatgaatttgctaaggcagaattattagaaatagaaccgcatttgtatgaacgatggatacaaggatgggccaggagttattacaccggcgagaaacatctcgatgccattttacaatatgcaacaccaaatatacctatcaaccggctaaaccaacatgtttggcgacagagtgtcgaagccgtaagagatgggttacgtagcctttcacgtgtgagggcgctctcagtgcagacagaacttgattctgtgtactatatacagtcatcatcggcgggttacggataccacagtgcgaaaggtgagcaaggcggcgaggtgcacaaccgagcaatacgtcgagctaaggccactttgtacgatgcaatccgcccagacggacatggcatagagtacgtcatcaaggagtcagtacctgatgtaggctatactcgcacccagctagcgaatatcgcagagaatcttaaagtacgaggcgtatggggaagagcattccactatattttacttgaaggaacaacggcaagaccattgcttgaatccgctcaagtgtcaaatacatttatgatgataggacgcgatccaacaactagcgtaccgggattattatcttccatcaaaggacaatacaaatggttaacatcaattgactggagtcaatttgacgcaaccgtgagccgttttgaaatacaaacagcctttgatttattaaaggagagagtcatcttcccagatttcgagacagaaatgtgcttcgaactgtgtaagcaactctttatgcataagaaaattgcagctcccgacggcaagatttacttctcccacaaaggaataccatcaggaagttattacactagtctgataggatcagttgtaaacaggttaagaattgagtatctatggagactcagattcaacagaggaccacaagcgtgttacgttttaggtgatgattcacttataggtgacgacgacttatttgatcctgcggatatcgccgaaatggcttatccacttaactggcttacaaacccaaacaagacagagtgttcaaccataccaggtatgataacttttctagggcgaaccgtcaaaggaggaatgaaccaaagagatcttaaacgatgtttaaggttactcatccttccggaacaccccgtagagtcaggtgatatttccgcttatcgagcagagtcaatcgcagcagatgcaggattcacaggatccgtactcaacacgatagcgaaacgacttaagaagttttatggtatagcttcagaagaagaagtaccaattaaattac

SEQ ID NO: 1335 - DNA, 1434 bp, Plant associated deltapartitivirus 5
  source 1..1434: mol_type = other DNA
atgactgctacaaacattaacattcgtgattacaatttcacaagttttcaaggggatcttgaattaactccagtgagacatcacgaaacaatcagacgagagtctgaaactatctatgaagatgagttcgctaaggctgaacttatggaaatagaaccgcaactgtatgaaagatggatttcaggatgggccaggagttattacaccggcgagaagcaccttgaagctattttacagtatgcaacaccaaatatacctatcaaccggctaaaccaacaagtttggagacagagtgtcgaagccgttagagatgggttacgtagcctttcacgtgtgagggcacattcagtagagacagaacttgattctgtgtactatatacagtcgtcatcggcaggttacggatacaacagtgcgaaaggtgagccaagaggagacacccatatgagggcaatccgcagagctaaagccacattgtacgatgcgatccgttcggacggacacggcatagagtacgtcatcaaggagtcagtacctgatgtaggctatactcgcacacagctagcgaatatcgcagagaatcttaaagtaagaggagtatggggaagagcattccactatatattacttgaagggaccgtagcaagaccattgctcgaatccgcccaagtatccgatacatttatgatgataggacgcgatccaacaactagcgtaccgggaatactttctaaaatcaaaggagattatgaatggttaacatcaattgactggagtcaattcgacgcaaccgtcagccgtttcgagatcgaaacagcctttgaactactaaaggagagagtcatcttcccagactttgaaacagaaatgtgtttcgaactctgtaagcatttatttatgcataagaagattgcagctccagacggaaagatttacttttcccacaaaggaataccatccggaagttactacactagcttaatcggatcagttgttaacagactaagaatcgagtatctatggagacttagattcaatagaggaccaaaagtttgttacgttttaggtgatgattcacttataggtgacaacgaattttatgatccagaggatttagcatacagagcttatccgttcaactggctaacaaacccgaataaaacacagtgttcgaccattccaggtctaataactttcttagggcgtaccatcaaaggaggtatgaatcaacgagaccttaaacgatgtttaagattattgatactaccagagtaccccgtggaatcaggtgatatttcggcctatcgagcagagtcgatcgcagaagatgcaggacgcacaggagcgacgctgaacaagatagcaaccagacttaagaagatctatggcatagcttcagaagaagatgtaccaattaaattacgtagatattat

SEQ ID NO: 1336 - DNA, 1437 bp, Plant associated deltapartitivirus 6
  source 1..1437: mol_type = other DNA
atgacaagttatcgcatgcttaatgattatgacttcaccgcatttggtagtgatctagaaagattagatcaaagtcatgctcatcgcattagacgagaagaagcgacaacatatcgcgacgagttcgctctaaaggaactcatggatataaaccccatattatacgagcaatttctagttggttggtcacggagttattacgaaggaagcaaacacttagaagcagtattacaatatggtatcccagacccaaatctcaatttagtagacaatgaagtttactcacaagcaagagatgtggtgttagaaagtttaggtagccttccacgtgtgagggcatttgacgtacttactgagttagacttagtgcattacgagcagtcttcatccgctggctatgactaccatggacctaagggacccataggaggtgaaaatcacaaaagggcaataaccagagccaaagctacattgtggtcagcaattgcagaagacggcgaaggaatagaccatgtcttaactacatcagttccagacgttggttacacccgcacacaattaacggatctatacgagaagaccaaaatcagaggagtttggggtagagcgtttcattacattcttcttgaaggcacatcagcaaatccattgcttgaggttttcaaaagaggcgaaacattttaccatatcggtagtgatccgcaatatagcgtaccaggcatactatcacaagtgtcagagcactgcaaatatctagtagcaatagattggagcaatttcgatgcaacagttgcaacgtttgagatccacgcagcattcgacatattaaagagtatgttaacgtttccgaacgtagaaaccgagcagtgtttcgaaatatgcagacaactcttcattcacaagaagattgccgcaccagacggaagcatttattggtcgcacaaaggaatcccatctggcagttattttacatcaatcgtaggatcgatcgtaaatagattaagagtagagtacatattcagaaaagcttacaacgtaggcccgaagatgtgctacacacaaggagatgattcactcattggagttgactttagagttgatcctgaaaagctgagtgatatagcagcaccattgaattggaagcttaatccagccaagacggaagtatcgatgtacccggaatacgtcacattcttaggaaggacgatgtatggaggaataaaccaaagagatcttaaaagatgtctgagattattaatattccccgaatttccagtaccatcgggcgagatttccgcttatcgagcagtatcaatcgcaaaagatgcaggaggcacaagcgatgtactgaaccagatagcaacaagacttcgacgaaagtatggagtggcaagagacgaagacgtcccaaggcatttcaaacaatacattccataa

SEQ ID NO: 1337 - DNA, 1443 bp, Port Orford cedar deltapartitivirus
  source 1..1443: mol_type = other DNA
ctgcacacgatggaccatcgcttcaggagcttgcctcgaggtcttatagagcttggacagattccagaacgaaggttaagagaagagtttcagatcatcatagatccttatattaatgaggcaatcaatgatacgatcaatgttactctaatcagagagctagatggatgggcgagaagtttctacactatcgaaggtcagatgatgcagatcagtaaatatgataggctaaagctacctgaacccgcgctaccagcatggaatgccgcaaagcaacatgccaggaacgttttccgtactctaccgcatgtcagggcaatctcctatcaggattttgattccgtcaagtggctcagagcatcagcagcaggatatggatatgtcggcaccaaaggtgacaatgacaattatcacaaggccaagaagaccgcagtgacaatagcagaaaagctaaaccatgaccgcagctacggaccgcaagccctcgaatcctcaacacctgacattgcgttcaccagaactcaattgtcccaaattaaggtgaagaggaaagtcaggaacgtgtggggagaagcatttcattatgtccttttagaaggattatttgcagatccgctgatacaacttttcaaagagtgtcagacattttactttataggtaaagatccactactagcagttcctgctctaattcaagagatactgattcaatacgactatgtctacatgtttgactggtcctcttttgactcatcagttcaagaatgggagatccgtttcgccttcgagttactcgaatcgatacttgtctttccgacttcggtcgaagagcagatctggcgtttcgtcatagagttgttcatataccgcaagatagcttgtccagatggaacactgaagttgaagactttaggtatcccctcaggaagttgtttcaccaatatcattggaagcatcgtcaattacgtacgtatcttgtttgtatttataaagttaacttctaagccagcagaagcattcacccatggtgatgacagtctcgctgcggttaactccgaacactacattccgatccagaacatcaaggaagtctgcgatccctttcaatgggagctgaacgcgactaaatcagatgtttcgaatcgagcagaaggcattaattttctgagcagaaccgtccgagcaggacagaactacagagatgagctgacagctttaagaatggcaaaataccctgagcaccccgtgcttgaaggtagaatatccacccttcgcgtggaatctatccttttggactcaggtttgaactcccataacttgttcagaatatttaaatatctcgaacagaaatatggtaaagccgaaaatctaccgcgccagcttgcgcgttggaacccattagaatatgagagccttaggttatcttatgattctacaatgtaa

SEQ ID NO: 1338 - DNA, 1434 bp, Quinoa-associated deltapartitivirus 1
  source 1..1434: mol_type = other DNA
atggcagtacacacactacacgggtacgagtacacttcatacgagcacgatctagagcttataggaggttttcacttgcatcaagttcgacgagagtcgagcgtaacgtatcgagacgaattcgcgctacgcgaactaatcgagacttatcccgttttgtacgagcagattttagaaggctggtccaggagttactatactggcgaagcgcacctaaacgcaatactacaatacggacaaccaaatatcacacttacacaggaagatcttcctctttggattagagcaagacaatctgtgtcagaattgttaggtagccttccacacgtgagggcgttcgatgtcaatacacaacttgatatcatcaattacgaaccgtcttcggcggcaggttacgactacaatggtgcgaaaggtcccactggtgattttaatcacacaagggctatccacagagcgaaagctacgttatggtcaaccattagagatgatgatttcagaccggatcacacgattcagtccgcagtaccagacgttggatacactcgcacacaattgacggatattcgggacaaacttaaagttagaggagtttggggcagagcgttccattatatcttacttgaaggcactacagcagatccccttctgcaagcattcaagcagggcacaaccttcttacacataggttccgatccgacaattagcgtaccacaaatactatcagatgttgcaaaatcatgcaaatggcttattgcactagactggagagcgttcgacgcgtcagtcaatagattcgaaatccacacagcattcaacttgattaaagagaggattgaattcccaaatcgagaaactgaagaatgcttcgaactatgcagacaccttttcatacacaagaaaattgcagcaccagacagtaaaatttactggtcgcacaaaggtataccatcaggcagttactttacatccattattggatcagttgttaatcgcatgaggatagaatttctctggttgaaactcaaaggacgaggtcctaagatgtgtttcacacagggtgacgattcactcattggagaagacgagtacgtcaatccaaacgatttagctgagttagcagcaccactaggctgggcactaaacgcagcaaagactgaagtatcacgcatgccggagtatgtatcgttcttaggtagaacaatatatggaggtttaaaccatcgagacattacgaaatgtatcaggttactcatctttccggaatatccagttgaatctgggagtatatcagcatatcgcgcaaaatcgatcgcagaagattcaggcggcacaagcaagattcttaacgacatcgcgcgtagtttaagacgaaagtacggactagctttagaaagcgaagtaccaaagaaatttaagatttatgtaccataa

SEQ ID NO: 1339 - DNA, 1443 bp, Quinoa-associated deltapartitivirus 2
  source 1..1443: mol_type = other DNA
atgtctaacattaacatctctggatatgagttcacagattttcaaagagactttgaaagacttgaaggaacccattcagagcaggttcgaagagaaccagaggttacgtattacgatgaatatgcaaaagcagaacttcgggatatgcaaccagaactgtacagacagtggatcgaaggatggtcaagaagttactatctacgcgaaaagcacatggacgctatcttacagtacaaaacaccaaacacaccactcacccgtctagatacagaagtctggcaagaagccatagacgcggttaagaatgagttaagtagccttcgcaattcgagggcgttatctgtaattactgatttagatcagatatattacgtacagtcctctgcagctggctacggttacattggtgcgaaaggcgacatctatggtgtcaatcacgatagagcaattcgcagagccaaagcaacactttactcagcaaccgcaagagacggagagggcatagagtacaccatcagacaaacagtacctgatgttggatacacacgcactcaactagcagatctcaatgagaagaccaaagtaagaggagtatggggacgagctttccattacatcctattagaaggaacatcagcgagaccgctactagaatcaataatgcaaggagacacattcattatgattggttgcaacccagtcattgatgtgccacgcaaactatctgaaatagctggaaatcccaacgtaaagtggatgaccgctatagactggagtcaatttgacgcaacagttagcagatttgaaatgaatacagctttcgatatcataaaggagaaaatcacattccccgattttgatactgagatggcttttgagctttcacgacagttgttcatacataagaaaatcgcagcaccagatggacgcatttattggtcacacaaaggaatcccttccggaagttattatacttcaattataggatcaattgtaaacagactccgtatagaatacttatggaggtttaaattttacgaaggaccagaatactgttacaccttaggtgatgattcacttatagggtacaaagagtattgggacccaaatgaaattgctgatttagctaaacagttaaattggattatgaacccaagcaaaacggaatgttcaacaataccagcaggaataacgttccttggacgtacatcaagaggatcacaaaaccaaagagacctcaagaaatgtctaagactagcgatactacctgagtatcccgttacagaaggaaaagtttccgcatacagaattcaatcgatctacgaagactctggatctaccagctcagtcttgcttcgattggcaaagcgactaagaaccaaatatggatttccgacagaagaagaaatccctcgattgcatcgcccttacacatttatgtaa

SEQ ID NO: 1340 - DNA, 1434 bp, Red clover cryptic virus 3
  source 1..1434: mol_type = other DNA
atggtactggacgcaatccgtggatactcttacacagattttgagggagaccttattaaaactgtagaaaagcattcacaccgtgttaagagagatctttacactacatatgttgataagtgggctgaaaagctactcatcaatgcacactcggaattgtataaacaatgcatcgaaggatggtcacggagttattatgaccctgaaagacacttagaagcgctttataattatgcagttgccgatattcccttatcaaggattgacgttgatttgtatgaacaatgcaagaacgtcattagacaagggtttcatagccttccacgcgtggaggcgtacgacgtacgaactgaactcgacaaagtttcgtacaaagcttcatcgacggctggctatggttatcagtgcgtaaaaggacctattggaggtgaaaccttcatgacggccgttcgaaaagctcggaaagttgtcggagaagttacagaccttggaactcaagggatggatcatctgattaagacactagttccggacgtcggacacactcgcacgcagctaaccaatttgttggagaagactaaagtaagaaatgtttggggtagagcattccaatacatacttatagaaggaacttccgccgacccattaataagaatgttctcaaagaataattcattttatcatattgggcgagacccgttggatagcgtgcctgaagtaatttcagaagcagcaggagctggaagatggttatatgccatcgattggaaacaatttgacgctactgtgagcagatttgaaattgaagcagcgtttgcattactcaaggaactaatcatattccctaatgagcaaacagaaatagcttatgaaatcagcaagcaaattttcattcacaagaagattgctgcacctgacggtttcatttatatggcacacaaaggaataccctctggtagttactacacgtcaattgtaggatcagtggtcaatagactacgaatcgaatacttatggcgaactatcaccggacatggaccaagtgtttgttacacacaaggagatgactcaatctcaagtgacgacacattcatcccaccagaaagatttgcgcaagttgcaaataatataggatggattataaatccagacaaaactgaatactcaacagttccaagtgaaatatctttccttggacgcacaatggtaggaggagcaaacattagagacacaaagaagtgtatcagattgctcgtataccctgagtttccggttgaatcaccacaaatttccgcttacagagcccatgcaatagcacaagatgcaggaggcttgaacgcaattcttaataggatagcaggtaagttaaagactgattacggtatggcacccgaagaaacggtaccagcacattttaagagatatgttatgtaa

SEQ ID NO: 1341 - DNA, 1443 bp, Ribbonwort deltapartitivirus
  source 1..1443: mol_type = other DNA
ctgggagccatgatggctgcacaggaacttattacacactatgtctatagggattttaatggaccattagagaaattaaatatgtcacatccacacaagatcaaccgtgaggaggccgtgaccctaattgacagtttcgctttagaggagctaaactctttaagcccaattttgttcgaacaacatttacagttgtgggctcgaagttattactctaaggagaaacacctagattcagtactttgttacggatctagagacctcagtcgatcagattttgatcaggtggcatggaatcatgctattgaggccacaagaacggagcttcgaaagctaggacgagtccgagcattcgacgttttgactgaattagaccaggtaccctacgagagtcaatcttcagcaggttacgattacattggtaagaagggacaattcagagacacgaaccaccgccgagcaatgggaagagccagagcaatagtcggagaggtagttgacgacccaaacgggatggaaagagccattttaacgatggtaccggatgttgggtatacacgaacacagctaacttatcttccagagaagttaaaagttagaggagtatggggaagagcctttcattatatattaatagaannnnnnnnnnnnncgttgatggaagcgttcaaagaaacggacactttcttctacgttggaaaagatccagtacgagatgtaccaaatacaattcacaaagctaagcgcaatggagaatggttattcaccttggattggtcgagatttgatgctacatgtagcaccgttgagattaatcaagcgttcgatttgatcaaggaatgtttggaatttccaaactggaacacggaggtcgcattcgaggtaagcagacaactgtttatacacaagaagattgcagcaccagacggtaagatttactggtcacacaaaggcacaccatcaggtagcggctttactatgattataggatcagtgatcaacaagctcagatgtgaatacatatggtttaaactatatagtaggtcacctcagttcttagttacgcaaggagacgatgcactaggatcagatgatacacaattcgatgtagatagagcagctgatacagcagcagaattaggttggatcctcaacccaggtaagactgaagttactaagcacccacaattagtagagttcttaggaagaggagagaagggaggaattaattcaagagagttaatacgatgccttagattattaatctatcccgaaatggaagtagattcaggcataatctcagcatttagagccagagccatagcagatgatgcaggtggtttaagtgagttactaaatcgcatagctgatagactagagttgaagtacggtcttccaacaaaagacgatgtacctaagtccttttggatttatacaccttaa

SEQ ID NO: 1342 - DNA, 1437 bp, Silvergrass cryptic virus 1
  source 1..1437: mol_type = other DNA
atggatcacagctttcgtggaattcgacagggccttattgagctcaagaagatttccgagagaagatcaagagacgaattcagagtctatcaagatgaatatgctgcagaagctatccgtttgattgtacccatgaacattcgttttgaattgcaaggctgggccagaagttattatgacttgcagcaacatgttcaagctattgaagcttacaacttaccaaagctgcctgaacccacccacatcgcttggaatcaaactaagcagatgacacaggctatattccgccaattcgaccagatagattgtctatcttacaaagattttgacagtgtaaaatggatgtcctcatcctcagctggttacggttacgaaggtcacaaaggtgacgacgataactacaagaaggcgaagaagacagcagtgaccatagcagaaaagcttaatcacgacgtcaattacggtcctgaagcaattaaagagtctacacctgacatcgcgttcaccagaacgcaactaagtcaagtcaaggtgaagacgaaagtcagaaatgtctggggtgaagcgtttcattacgttttacttgaaggattgtttgctcaacctatcgtcgagtatttcatgaacattaactcgttctacttcatcggaaaagatccactactctccgtccctgcattaattgacgagatgctgcgtaataaagattacgtctacatgtttgactggtcagcgtttgacgctaccgttcaagaatgggagatccgattcgctttcgaatgtttggaatcaatgatccagtttccgtccacggtcgaattccaaatctggcgttttgtaattgaactgttcatatatcggaagattgctagtcctcacggggtattgtacttgaaaactcagggcataccgtctggcagttgctttaccaatatcattggaagcatcacgaactacgttcgtattcagtatatgtttaaccgcttaaccggttcgtttgccacagtctacactcatggcgacgacagcctagccgctgttaacagtgatcaatttgtgcacttcaacgcacttgaaaagatagcatcagagcatctttggaagcttaacgcttctaaatcaagtatgtcaatgaagcaagaaggtgtaaccttcctcagcagaacagtccgcgaaggtcagaaccgacgcgaagaacttgcctgcctgcgcatgctaatgtatccagagtatcctgttgaatcaggtgatctgtcagctctcagagctttcagtatcatgaatgactccggtttacactcctcctatttcttgaaaatctttcagctactcaaagagaaccatggaatagcggcgtccctacccaatcacttgaagatctgggacccaaaggaatacgaagcccgaaaagtttcttattccatgtatgtaatgtag

SEQ ID NO: 1343 - DNA, 1416 bp, Spinach deltapartitivirus 1
  source 1..1416: mol_type = other DNA
atggaaggtttaacattcctcgggactatcccggctcgtcacttacgtgaagagtacgtcatacttacagaccaaccggtctatgacagtgttaaagattacgcttccaatgctgacatgcaagaaattgatggatgggcaagatctttctacacattagaaggaatactcgattccatacagctattcagcaagccactcattccagaaccaactgactcattgtgggatgaaacaaaacaggaagttttcaacgaaatttcgaacttatttacaccagtaactagtttgtcttttgaaacaggttttgattcagttccttacgaacacagttcagcagccggatacggctacacggggaagaagggtgaaggtgacaacctacatagagctaaagctatagccaacaaagctgtacttgattttagtgaaacaattgacaaagatggttttcagacagccgttgacaatatggttcaacaaagtactcccgacgtggcatttaccagaactcagctggcaaagcttccctctataaaggttaggattgtctttggcgaggcatttcacttcattctcatcgaagggttatcagcagctcctctcttagaggcctttaagagaacggactccttttactttaccggaaaagacccaactatacacgttcctcaattgatccacaaaatggggttagaagaaggatggttcgtctgccttgattggaagagtttcgactcatcagtccaattatgggagattgatttcgcattttcatgcgttgaatcgttattgacatttccttcagagaacactcgaagagctttctacttagcaagagaatccttcaaacatcgtaaactagcagcaccagactgtaagttatggatgagaaaaggaggtattccctcaggaagttacttcaccaacataattggtagtattattaattacaccagaataacttatgtttgcaagaggttaggtcttagaaagaccagttgctacgtacaaggtgacgattccgtcacatttgttcagacaggacaacgtcctgacttgtatcaacttcaagcactcggcaccgaattcggatggtcattgaacattccaaaatgcactattacccaaagtagtcacaatgtcacattcctcggaagaagccaagttcatcaactcaacacaagagaaagactcaaagtcttacgtctcatgtgtttcccggagtttaaggttgaagatcccaaaatttcaaccgcaagggttaaagcaatcgctagagatgcaggatggaacgatccactctacacacgtatttacttacgtctctctcgcttgtacggagaagtcgaaagactccctccccatttaatgacttacgtagatcgtcttgattttcaagatgttaatatgtaa

SEQ ID NO: 1344 - DNA, 1434 bp, Subalpine fir deltapartitivirus
  source 1..1434: mol_type = other DNA
atggatcatcagttcaggaaagaacgtagaggtcttatagagctcggcgtcattccggaaaggttgatcagagatgaatgcgagattttagtcgacccgtatgctgaagaagcaatcgaccgactagcgtccgtagacatcaagcgagagctagcaggctgggcgaggagttattatacccttgatggacacttagaagcaatcatgaaatatgatcgtcttaagataccagaacccacagaacaagcttggaatcgtacgaaacagtacgtactgacagaatttagaagaatgccaactgtagaagtcttatcatacaaagatttcgataaagttaagtatcttcgctcttcatcagcaggttatggctacattgggctcaaaggagcaccgggtaattatgaacgcgccaaaagaacggcagtcacaattgcagaaagtcttaatcatgatccagcttatggacctgaagctattgcgaactctacacctgatattgcgtttacaagaacgcagttaagtcaaattaaggtgaagagaaaagttaggaatgtttggggagaagcgtttcactatgtccttttagaaggcttattcgctgaccctttaattaagagttttatggaacgacatacgttctattttattggaaaagatccactcttagcagtacctgctttaatccaagagatattgagttatactgattacgtttaccagctagactggcaagcgtttgatagttcagtacaggaatgggagatacgtcatgctttccacctattggaacaacttctggtctatcccagtaaagttgaaaagcagatctggcatttcgtcattgagttattcatttacaggaaaattgcttgccctgatcgaaggctacgtctaaagacattaggcataccgtctggcagctgtttcacgaatatcgtcggtagcatcgtcaactacacacggattcagtttctgttcatgaagttaacccgcgaaccatccgtcgcctatacacatggagacgatagtttagctggcgttagcgcaactcaatacatcccgctatcagtgctttccgaatcgtgcacgccgtacgattggcaactaaagcttgagaaatcactcataagtagcgaagcagaacagaccacgttccttagtcgaacggtccgcgaaggtcaaaacttcagagacactctgacctgcctcaggatgcttaaatatccagaataccctgtgcccacaggagacatttcaactctccgagcgttttctatcgctaaggactctggtttatcttccactcttctcacaaagatatttcaatatcttcagtgtaagcacggaatggcacaaactctaccgctgaatttgcagcgctgggacccgtttgaatatgaactgttgagacagtcattttcgacaacattgtaa

SEQ ID NO: 1345 - DNA, 1488 bp, Taiwan douglas-fir deltapartitivirus
  source 1..1488: mol_type = other DNA
ctggcgaggaagtttattggagggattctcattttacacaacaatacaatgacaaatttacatcaatcaatacacaaaaggtatactaaacctatggagcttatttcgcgcaccagggctataccagggagagacgagtgcatcatctacagagatgagacactacttagagctctttcaaccagaaatccggaactaacacaagagttagacggttgggctagaagcttttacactaaggagggacatcttagtgcaatttcagcctatgacaggattgacgtgccattcccacaggatgagcatagccaacttgtcgatgaacacctggaacgggtgtttgacggcttcacacagcaagattcactttctttcgagacgcaactaaaattagtgcactttgaaagtgactccgcagctgggtacggttacacgggtcgtaaaggcgacagtgataatcacagacaagcagtcaggacagcgaatgcaacaattcgggacttattcaataatcttgaaggcgacacagtatcagccaccatcaattggctacacaatactactcccgacatcgcattcactaggactcaactatcttaccttcctgataagatgaagatccgcaacgtttggggtgcaccattccattcgattttaatcgaaggtctaacggcacaaccaatcatggagtactttgctacgcatcgtacattcttcaccatcggagaagatcctaagataagggttccgcaattgatctcagagctcattgcccgcaatacagtttactgcatagactggagcggctttgacgccagcgtatccgctgaagagattgattttgcgtttagtctcattaagcgtatgttgaatttcaactctcactacgacgagttatgttttgaagtctcaagactgaacttcattcaccgaaaactcatcgatccagagggcaagatattactcaagcacagaggagtaccatccggtagcttcttcacaatgatcattgacagcatcgtcaatgctcgaaggatattatacatctttcactctataacaagagtgatgcctgagatccactgccagggagacgattcattaacaggagttcctgcgaactaccaagtctcgcgaggacatatttctgcgatctgccaaagacagctatggaccatcaatccagataagctgaagatcagccgatatcctgtagaactagaatacttgggcagaaccagctcaggggactacaatttcagagaaagacagaaggtcatacgactggctatattcacagagtatccagtggcctcaccacaaatctcggccgcacgagcgcacgcactgtgcatcgacagcagcttcaggatccccgaactcgtccaagcatggaagtctttaacaagacactatggcgaagtaccaccagaacaactggacaggagacttcgaccgtacgatccaacaaagttcttacgcgcctaa

SEQ ID NO: 1346 - DNA, 1052 bp, Tree fringewort deltapartitivirus
  source 1..1052: mol_type = other DNA
ccgtcccatttgagggaacagcatcatcaggctttgattatgttggtaagaaagggccaattttcggagctaatcatcgacgagcaatggcaagagcgagagcgaccattggtcacatagttgatgacccaacaggcatggaaagatccattttaacgatggtaccagatgttggatatacaagaacacaactaaccgaagttcgagagaaacttaaagttagaggtgtttggggaagagcctttcattatatattaattgaaggtacttcagccgccccgttactagaagcgttcaagaataatgacacattcttctatatagggaaggacccaacggtagacgttcctaacacgatccactcagccaaaagaaataacacttggttatttacactagattggtctgcatttgatgcgacagctagtacgattgagatcgatgcagcgttcgaccttttaaaggaagcactagacttcccaaactttgatacagaagttgcgtttgaatttagtagacagatatttctacataagaaaatcgcagccccagacggatccatatattgggcacacaaaggaataccttcaggtagttactacaccatgatggttggttcagttattaataaactgagatgtgaatatatatggcacgctttgtatgagaagtcaccggactacttggtcacacaaggagacgatggtttcggagcagacgacattcagtttgatccagatgaagcagctcatctagttaaacacctaggatggaagttgaaccctgacaaaacagaggtttcaatgcacccacagaacatggagttcttaggtaggacagagaaaggcggattaaactcccgcgagctagtcagatgtttaagactgttagcgttcccagagcaagaggttccgaatggaataatctcagcttatagagcgagagcaatcgcagacgattcaggtggtacgagccaattactgaatactgttgctgagagattagaggcaaaatttgggatccccgatgaaaaggacataccaaaagcattc

SEQ ID NO: 1347 - DNA, 1494 bp, Vaasa deltapartitivirus
  source 1..1494: mol_type = other DNA
atgttcgtaaaacgaaatgaaatggatcgtccgtctaactataccctggaattcgtccagcgcgtaaagccccatcacatcaaacgtgacccgtggcttgttgacccctatgtcaaagagtctctcgaagagctcatcggccgctccaccgtagaagagtttggttcctacaccagatctttctacacccttgagggccattattcaaacctgtggaaatatgatcgtccgatcactccaccgatcaatgacccgatatttgatctcgccgtccagaaggcccgcgaatcactccgactacccgttccagtctcaacgtataattgggaacgactaaaagatgtaccctacatctcctcctcatcagcaggctggggatacattggaaagaaaggtgcacccggtaatcaaacccgcgcgattgaaagagcaaacgcctacctcaggtggtggctcgacatgcgatatggtaaagcacgatacaactacctatatcaccccgatctcgcatggactcgaactcagatctctgagatcgacgctccaaagataagacatgtatggggcaagtcctttgaaaatataattctcgaaggtatttctgccgccccattagtacaagcttaccgtgatttccaatcaccgatcgtaattggacagagcatgtacaagcgcctcccgctaatcattagccaggtgctacacaatagtgacgatgagtacagaccgaacttcggtatcggtattgactttaagtctttcgacaccagtccacaagaatggttgattgatatcgcctttgatatcctcgaagataacctgatcttttccggttattacgagtatgaaagctttaattacagtaaatactatttcactcacacaccagttgtcatgccagatggccgcctatggcgcaagcacttaggtataccgtccggtagttacttcacacagctaataggctcaactattaacttgatccttatgtattacatacaactcaagctgtacaacaagactttcatgacttacgtcctcggtgacgattcactatttggaatacccgcagaatacggctaccctgacctcgatcagatggccgcaattgttagccctttaggcttcacgattcatccacacaaatgtgttgtcgctaatcgacctcaagaacttcacttccttggtcattatgctagacatactcgtgttgatcgcgatgaagcagagctaatgcgcatggttctctacccggaatatccggtggatggacccaccatgtcgatgtcccgagtccttgggatgatgatagattcagcactgaactcctgggctgcagtacacctttacagatatatgaaagcaaagtaccgcaacctgattcctaacactatcacattcacaacggatatgaaggactggctcgtagcagtcgttggcactgcccctgagcaacacctcttaacagaatttgatatattcaatatcacctaa

SEQ ID NO: 1348 - DNA, 1434 bp, Yunnan larch deltapartitivirus
  source 1..1434: mol_type = other DNA
atggatcatccctttcggaaggagctgcgaggtcttatagagcttgaagtcattcctgagagattgatcagagacgaatgcatggtcctagaagactcttacgctgcagaagcaatagatcgactagcgccagttgacgtcaagcgagagctagcaggttgggcaaggagttattatacacttgaaggacatttagaagcaatcatgaactatgatcgcatcaagatccctgaacccggagaaccagcatggaatcgtgcgaaacagcacgtgttgacaaaagttaggagattacctaaagttgaagcgttatcctttaaagatttcgatcaagttaagtatctttcatcttcatcagcaggttacggctacattggactcaaaggagatccaggcaattatgagcgcgccaaaagaacggcagtcacaatagcagagagcttaaatcacaatccatcatatggacctgaagcaattgcaaactcgacacctgatgttgcgtttacacgaacgcagctaagtcaaattaaggtgaagagaaaagttcggaatgtttggggagaagcgtttcactacgtccttttagaaggattgtttgctgacccccttatcagaagttttagaagtagaaattctttctatttcattggacgagatccacttctggcagttcctgctttaatccaagagatattgagttatactgattatgtctaccaactagattggtcggcattcgacagctcagtacaggaatgggagatacgttatgctttccacctattggaacaacttctggtatttccaggaaaagttgaagagcagatctggcatttcgtaattgagttattcatatacaggaaaatagcatgccctgatcgcagaatacgccttaaaacattaggcattccttctggcagctgtttcacgaatatggtaggtagtattgttaactacacccgtattcagttcttgtttctgaagctaaccaaacagccagccatcgcgtacacacacggagatgatagcttggcaggagttagtactactcaatacatccagctacacatactacaagcagcatgtgagccatacgactggcaactgaaagcagagaaatcagctatcagcagcgaagcagaacagacgactttcttaagtcgaacggtccgcgaaggtcaaaacttcagagacactctgacctgtctaaggatgttaaaatatccagaatatcctgtgccctgtggagcgatatcaactctacgcgcctattctatagcgaaggactctggcttatcttccaatcttctcaccaagatatttcaatatctcgagagtaagtacggaatggcacaaaccctccctctgaatttgcagagatgggatccaaatgaatatgagttgttgagacaaccgcattcatcaatattgtaa

SEQ ID NO: 1349 - DNA, 1623 bp, Cordyceps chanhua partitivirus 1
  source 1..1623: mol_type = other DNA
atgtcattggaagacagtagcgatccaaccttactcgacttagtcgagtctgtacccgtcgagacagacgtctcagccctcacaccatctcggagagtgaggggccaatcgtatgacattattccaagccggtttaattctccgaatttacgtgaagtcgcaagatacggcggctatggcgtgtatggtggtcagtctaacactgacccgtgggtccgaaccacgttaaaaactttttctcgtgaaatttacgagcagatatatggctacacgcgtaagccccaaggtacgccaggcatgtatcgatcactgttaaagttcagtgatgacaagtatccgtttcgtggcctgagtcgtgaacaacgccaggcaatgcagaccgcaatcggtctggccaggaaggctttcaagctaccttacaaatcggaacctctcgattggcacgaagtgggccaacacttccgccgtgacacggcggctggtgtgtcgttcatgggccaaaagaaaggcgacgtgatgccggagatttatcacaaggcaaggtggcttgggcaccgcatgaaacaaagtggtcgtgctcgtttcaacccaacccgcgttcagtttccaccgtgcgtggccgggcagagaggaggcatgtcagaagcctctgatcctaagacccgtttagtttgggtttaccctgcggagatgttggttgtggaaggccaatacgctccggtgatgtaccgcaaatacatggaatgggaacacagtccgatgcttaacggcaagtcggctcagcgcttatacactgagtggacctgtggtctcagagatggggagactttgtatggtttagatttttccggatttgatactactgtcccagcctggctcattcgtgtggcgttttctatactacgtcagaatatcgagtgggagtactggaggggcgagaaagttaccaagcgtgaatccatgaaatggaagaacgtttgggatggtatggtctggtattttatcaataccgtgattctgatgcctgatgggcgcatgttccgcaaataccgcggtgtgccgtcgggttcgtggtggacgcagatggtggattcagtggtcaactggattctcatcacgtacatggggctgtgtcaggcagcccaaatacgaaacctcaaggtgcttggtgatgatagcgcctttagatcgggatcccccatttgtttggaacgcggagcttcggacctccgacgtgtagggatgaaactctcaaccgagaaatgtgaagtcacctgtgacccaggagatttcaagctgttgggagcgcggtaccgatacacacgggcttaccgtgatactgaggagtggtttaaacttctcttgtaccctgagtctgccgtaagggacctcggcgttagcatgagtcgtcttgttggcctgtggctcgggggagcgatgtgggatgacaccttctgtcgcttcttcgagtactaccagcgcagtttcccctgcccggtagaaggctggttctcgaaggaccaacgtcgttggctggaagtggtttactccggcaaggcacccagagggtggagcaacagaaagtctctcttctggcggtcaatcttttatacctttggttaa

SEQ ID NO: 1350 - DNA, 1632 bp, Erysiphe necator associated gammapartitivirus 1
  source 1..1632: mol_type = other DNA
atgacttttgaaagttccgaccccaccttgctcgacattgctaccgtagaggagtccccttcagtggacgactccctccttgttccgtctaaccgaacgaggggtgccagctacgatgtgttagagcaagactttaagtcacaaaatctttcggagatagccagatacggcggctactccacctattcaggtgccagtaacacggatccctgggtgcgcaatgcactaaaaactttttctcgcgatcgttacgaggaaatctacggctttacgcgtcgtcccgagggcacacttgggatgtaccgttcgctggagaagttctccggtaactctggttcatttaactcgctaaaccgtgtacaacggcgagcgatgataaaggcaatctcaagggcaaagaaagcgttcaagctcccgtggaaacaggagccgcttgattggcatgagatcgggcagtacctgagacgtgatacgtctgcaggtgtcacatttatgggtagccgtaaaggtgacgtgatggaggaaatctatcacgaggctcgatggcttggacatcgtatgaagcaggacggaactcaacgtttcgatccttccaagatgaggtttccaccttgtcttgctggtcaaagaggtggcatgtcagaagccactgacccaaagaccaggttagtttgggtttaccccgctgagatgttggtggttgaagggcagtacgccccgaggatgtaccatgctttcatggcagatccgcattcaccgatgcttaatgggaagagttcacaaaggttgtataccgagtggacttgtggactgcgcgagggggagaagttgtatgggttagacttttcttcctttgacacaaaggtgccttcttggctgattcgtgtggcttttgatattcttcgacagaatattgacttctccgtttggaacggttcgaaggtaagcaaacgcgatgcgcaaaagtggcgtaatgtttgggatggtatggtctggtattttatcaacacgccaatgttgatgcctgatggccgtatgtttcgcaaacaccgtggtgtcccctccggctcttggttcacgcagatgattgattcagtagtcaattatattctgatctgctaccttactgactgtcaggactgtgaaatcagaaacctgagagttcttggtgacgacagtgctttccggactggtgacaagtttgatcttgaaaccgcccagattgatgccaacgtcgtggaaatggtgttgaaacccgagaagtgcgagatctcggtcgatcctaatgagttcaaactgttaggtaccacctaccgcgatggaaggccacaccgtgaaacggttgagtggttcaagttggcactgtatcccgaatcttcggtacgaagtgtggaagtttcactttcacgcttggtcggactgtggattggaggagccatgtgggaccgtgagttctcactttttatggaatacttccaaacctgctttgagtgtccttcggaaggctggttttccaaggatcaacgtcgatggctcgaagttgtgtacggttcagggaagtcccctcggggatggaccacgaagaggtcgctcttttggcgatcaatctttttctcactgggtcactcttga

SEQ ID NO: 1351 - DNA, 1620 bp, Gammapartitivirus sp.
  source 1..1620: mol_type = other DNA
atggacgactatactcaagatccaacccatcactacatcctagctaaggggtctcatttagttgacgcactccaccttcgacctgcaaagtcggggtcaaccactagcgaagaagtagtcccgtccaatttccaaaatccaaacttgcgcgagatagccaagtatggtgggtacgcaacgtactcgtctaactctaataccgatccttacattagagagacgttaaaactcttttctcgagacatctatgaggacatccgtggttttactcgccgtccagaaggcacaccgggcatgtacactgcccttcacaagtttgccggtgagaaaaacacattcaatgatctttctcctactcagcgtatcgctatgcacaaggcgatcgctaaaaccaagaaagccttcaaacttccttatcgacgtgaacctcttgattggcacgaggtgggtcaattcctgcgacgtgatacgtcagcgggtgccaccttcatgggcgccaagaaaggtgatgtgatggaagatatttatcatgaggccaggtggttaggtcatagaatgaaacaggatgggaaaagacgtttcgatccacgcaagatgcgatttccgccgtgtcttgcaggccagcgtggggggatgtcagaacgtgacgaccctaaaacgcgcctggtgtggatctaccccgctgagatgttggtagttgagggcttctacgcccccatgatgtatcgtgactttatgagcgatcccaattcaccaatgcttaacgggaaaagtgcgcaacggttgtacaccgaatggtgttgcggcttgcgggagggggaaacactatatggcattgatttttcatctttcgatacgaaagtaccggcatggctcattcgagttgcatttgacattctcagacagaacgtgaactttgaaacgttcggtgggaaacctgtgggtaaacaggatgcacagaagtggcgcaatgtttgggatgccatggtgtggtattttataaatacacctatcttgatgcctgatggacgtatgttccgaaagtatcgcggtgtaccttccggatcctggtggactcagatgattgactcagtggttaaccacattcttgtcgattacctagctgagtgccagaaagtagagatccgaaacctgaaggttctgggcgatgacagcgcattccgctcaaacgaccagttcgatctggaagttgcgaagggagattgtgtcccaaccggtatggtcataaaacccgagaagtgtgagaaatcacgagacccaagtgatttcaaacttcttggcacgacatatcgtgatggtcatgtgtttcgagaagacgatgaatggttcaaactggcactgtatcccgaatcaagcgtgttaacgcttgatgtgtcattcactcgtctgatcggcctgtggataggtggagcgatgtggagtcgcaagttctgtgaattcatggacttttaccagaaaagctatccgtgtcctgaggaggggtggttctccaaagatcagaaacgatggcttgaggtaatctactcaggcaaagcgccaagaggatggactaccaagagaagtctattttggcgatcaatcttctatgcctatggctag

SEQ ID NO: 1352 - DNA, 1620 bp, Metarhizium brunneum partitivirus 2
  source 1..1620: mol_type = other DNA
atggaagattttactcaagatccaacacaacactacgtcctagctaaggggtctcatttaattgacgcactccaccttcgtcctgccaagacggggtcaaccactagcgaagacgtccttccaccttcgtaccgtgacgataacttagccgagattgccaaatatggcggttattcaacgtacatgtctaactcgaataccgatccttgggtacgagagacgttaaaactaaaggacagagagatgtatgagcacatccgtgggttcactcgtagaccacagggcacgccaggtatgtacaaagccttggcaaagttcggtggtgagaagaacacattcagctcgctctccccgtggcaacaacgggcgatgaaacgatccatcaagaaggcattcaaggcattcaaactgccttacaagcgtgaaccccttgactggcatgaagttggccagttcctcagacgtgacacctcagcaggttcaacgttcatgggaagcaagaagggtgacgtgatggaagagatttatcatgaggcgaggtggctaggccacagaatgaaacaggatggtaagaagtctttcgatccaaccaagatgcggttccctccgtgcttggcaggtcagcgtggcggaatgtccgaagtagatgatccgaaaacgcgacttgtgtggatttaccctgcagagatgttggtagtagaggggttctacgccccactaatgtatcgtgactttatgaacgatcccaaatcaccgatgttgaacgggaagagtgcgcaacggttgtacaccgaatggtgttgccacttaagggaaggagagacgttgtacggacttgacttcagttcgtttgataccaaggtgcccgcgtggttaatcaaagtagcgtttaacgtgttacgtcagaacattaactttgagacttttgaaggtaagcctgtgagcaaacgggatgcccaaaagtggcgaaacgtatgggatgccatgatatggtattttatcaacactcctattttgatgccggatggacgtatgttcaggaagttccggggtgttccttccggatcttggtggacgcagatgatcgattcagtggtaaatcacatcctcatagattatctggcagactgccaaaaagtagagatccgaaacctgagggtattgggagacgacagtgctatgcgaagtagtgaccagtttgatctggaaactgctcagcaagattgtgaaccattggggatgatactgaaacccgagaaatgtgacaaaacgaaagacccgtcagatttcaagctgcttgggacgaagtatcgtgatggccgtgtttatcgtgctaccgatgagtggttcaagctcgcgttgtatcccgagtcaagcgtgtttacgcttgatatttcattcacacgcctcatcggcctgtggttaggtggcgcaatgtgggataagaagttctgtgaatacatggactactttcaaacatcttatccttgtcctgaagaggggtggttctctaaggatcagaaacgttggctcgaagtcatctattcaggcaaagcgccaagaggctggactactaaacgtagtttgttctggcgttcaatcttctacacctttggttag

SEQ ID NO: 1353 - DNA, 1620 bp, Ophiostoma partitivirus 1
  source 1..1620: mol_type = other DNA
atgtctgatttcacgcaagatccaacccaacactttgtcgaaactgaggggtctcatttagttgacgcactccacctgggtcctcaaaacacccggtcaaccaccagtcaagacatactaccagacaagcacgccgggcgataccttaagcaaatcgccaaatatggtgggtacggcacctaccagtccacctcgaacacagatccctgggttcgagagactttaaaacattttgatcgaaaacaatacgaagaactccgtggctttacccgtcgtccggatggcactcagggaatgtaccgttccctggccaaattcgacggtgaagaccagtccttccatctcctgtcgcgctcgcaacagcgcgtgatgcgtaaatccattcgtaaggcgtttaccgccttcaaattgccttacaagcgtgaaccgcttgactggcatgaggtaggaccattcctgcgccgtgatacggctgctggttccaccttcatgggtagcaagaaaggagatgtcatggaagaaatctaccatgaagcgcggtggcttggccaccgcatgaagcagaacggagatcgacgtttcgatcccacccagatgcggtttcccccgtgttcggcaggacagcgtgggggtatgtcgtctatcgatgaccccaaaacgcgcctggtgtggatctaccccgctgagatgctcacggtggaggggttctacgcccccagaatgtatcatgactttatgaatgatagcaattccccgatgctcaacggaaaatcatcacaacgcctatacacggagtgggtttgtggtgtgagggaaggtgaaaaactatacggactggacttcagttcgtttgataccaaggttccaccctggttgattcgtgtggcatttaacgttcttcgacagaacgtggcctgggatacctttgaaggtaagcccgtttcaaaacgagatcgccagaagtggagaaacgtgtgggacgccatggtatggtatttcatcaatacccctatcctgatgccagatggacgtatgttcagaaagtatcggggtgtaccttccggttcttggtggacccagatgatcgactcagttgtgaattacatactggttgattacctggcggggtgccaagaagtagagatccggaagttaaaggtgctgggagatgacagcgctttcgtgtcgggtaaggatttttccttttcccaagcgacagctgactgtatcccaactggaatggtcttaaaacctgagaaatgtgacgtaacggataacccatccgaattcaaacttctcggtgtgaagtaccgtgacggccgagtgtatcgacccactcttgagtggtcccaacttgcgctgtatctagagtccaacgttcctgacgttggagtagggctatcccgtttgattggcctgtggttaggtggagcgatgtgggacaagcaattctgtgcatacatggattactatcagtcctcataccagtgccctgaagaggggtggttctctaaagaacaaaggcgctggcttgaaatcgttcattcaggcaaaagtcctcgaggctggacaacaaaacgcagtttattctggcgttctatcttttatgccttcggttaa

SEQ ID NO: 1354 - DNA, 1602 bp, Aegean partiti-like virus
  source 1..1602: mol_type = other DNA
ttgagcaagtctcagggagggataaacgtgcaccatacgcagatattaagagatataagtaatattatatattctaacgaagattatacaagaaaagtagaagaagtcagtactttaaaggaagagtttagttttgtcataagtgacaagctcaaaaacaagttattacagttctctgttccctcaattgagaaaggaatttacggagtcgtaaccaaggtatttccacggtttaaaaataagatcatcctggattatacagttacatcacaagatataaaggacgctgactcgtctgagttgaaggtctacgcacgaaataaagaagtcgttctatctagtagcgtgtacccagctttccttatagtaatcaagaaaacgttcttccgcatgttcaatggcttgaacaagagcaatctaaaaattagccacgatgaggcaatggaattattaccgtcgtctacttcggcgtgctatccaacattttccaaaaaaggaagcacaatatcacaatttgactgcagaaaaagaatgaagacatttggttcgctctcgagcctaaattccatgataacttttttatatgaacacccaacagtcatatttcatagggttagcaataaacttgttaaacgtaaggatgggatgtacttttctactcctaaaataaggcaagtttttggtataccgcattttatatgtgctttggaaggagtgtattttaaagagattatggaaggatacaagaggtcgcattcagacaggattactatcggctacaggaaggtagaagtctcggaatcagttagatacatgagaatgaaggcgaaagaaactgacaaggaaattttttgcggagacatttctggttgcgataagagcgtgcctgcgctatttactttcatattcgccttattttcgctcaatttatacgacagcgttagagatgccaactttattttgagtttgcttcactatttttgttatacgccagtcgtttattcaggggtgaaaaaggtggttactaatgggtcgacaacgtctggatccgcgttaacgtcaatgtttaatacctttgtgattctaatctgcctagaaactgtattcttcgttttaaacggaagacttccagacaagggcgaagttttagttcaaggggatgacttcttaatactgttaaaagggaaggatgaggtcgttaagcttaagaacataatggggcagtttaatttcagaattagggctgatgctgacctactatgttcggatggacaagacgttgagtttttaggatttaagtgggataagtactgttcaccttatcaatctgaggagtggttcgttgctaaactgttatttcctggtagaagggttaattatcccggaccaggtaggctaatagctaaatacctttcgctccttttccaagtacgtaattatcacagtctatattacaaattctacaaacacgacatacatttgaggcaacatattattatgggtaaagatccttgtcttactctgatagataataggggaagggttgctaagacaatattccctgtttcctattttctaagaaaagggtggaaagctttttaa

SEQ ID NO: 1355 - DNA, 1503 bp, Alloteropsis cryptic virus 1
  source 1..1503: mol_type = other DNA
atgtttatttttcgtatttgcgatccaaataaattctcatgcatagcacatgtaggtttcaaccatccatggcgcagcctcgagcgcggtttaattccgcacaagatgattgctccaaggaaaagccgcgaagaagaagtgattcttattgatcattatgctgctgagcaaatagatcgacatgtaccacttcacattcgtttagagctagatggctgggcaagaagtttctatactcacgaagcgcacatgaatgcgatcaagagttacaacaaaccaaagctcccgcctccgagtgataccgcatggtctcaaaccttgcagcacacccgtaccatattcaacagactgccaaaggtcaacaccatcccctatacagaaatggatagagttaagtgggttagatcatctgccgcaggctatggctacacaggcctaaaaggagaaggtgacaattacgagaaagcacgcaaaactgcgttcacactcgctgaaatgttacaccatgatccaggatatggagtaaccgctctattgaatcagacaccagatgttgctttcacacgcacacagctgtgtcagatcaaggttaagcgcaaagtaaggaacgtttggggtgaagcttttcaccacgttttgcttgaaggtctctttgcagatgccctcatcaagatgtttgccgaacaagacacattttacttcattggacgcgatccactgttgtctgtgcccttgctaattgcagagattttatctgagtatgattatgtctatatgttcgactggtctggctttgacgccacagtgcaagaatgggaaatccgttttgctttcgaatgtttggagtcactgataaagtttccttcaaatgtcgaacgagatatttggcattttataattgaattgttcatatacaggctaattgctgcccccgatggcacgatttatctgaagacgatgggtattccatccggaagttgtttcaccaacattgttggaagtattgtaaactacatccgcattcagtacctgttcaagagactgactgacgactgggctcatgtattcactcatggtgatgacagccttgctggagtcaagacaattcagtacgtaccgatggccaactttggatccatctgcaacgagtttctgtgggctatcaaccttgataagtcccgcgtgtctaaccagatacgtgaaattggttttctgagccgcgaagttcgagaactacaacacaacagagatgaacttgtttgcttacgtatgctcaagtttccggaatatgaagtcgaaaacggcggtgtttcaaccctccgcgcttattcgattttccgcgacgctggtgtccaatcacgatacctgttcaaaatctacaaatccctgaacattaaatatgggaaggctgaattcctgcctctcaagcagaggaactggaatccgatagagtacgagctgctgagacagtctcgctctgaggaaaatttgtacttagattga

SEQ ID NO: 1356 - DNA, 1446 bp, Alloteropsis cryptic virus 2
  source 1..1446: mol_type = other DNA
atgtctggatttaggagcgcactatttggattcaatttcaccaatttcgcaagcgattttgaggaaacatccatgcgacacactcatgttgttcggagagaacatgccgtcacttatgtcgacgaatatgctctagaacacataagggatgtcgacgagaaggcatatgaccattacctaaaaggttggtctagaagctattatcttccagagaaacatctggaggccgtaatgagctatgcctctccaaatttcccagcttctcgacttaatgttggtttgtacaaccaagccattcaagtcattaagaacgagtttcgtagccttccacgtgtgagggcctttgatgtcttgactgaattagatcaagttccatacaaacagtcttcagcggcaggttacgactatgcaggtgctaaaggacccattggtggtgaaaaccacaaaagggcgatcagccgagctaaagccatactctggtcagccatcaagtcagatggtgaaggtattgaacatgtcatcaactcttcagttcctgatgtcggctacacacgcacccagttggcggatctatatgaaaagacgaaagtacgacaagtatggggccgggcatttcactacattatcctcgaaggagttgtagcttacccaatcatccagcttatcactcagaatgatactttcattcatgccggaaccgatccaacattcagtgtaccagctttattatctgatgtctcatcaagatgtgactggatctactcactagactggaagtcttttgactcttcagtatcaagatttgagatcaacacagcctttgacatcattaaagagcttgtcatctttccaaactacgaaacggaacaatgtttcgagattacgagacagctatttattcacaagaaagtagcagccccggacggaaaggtgtatttcgtacacaaaggaatcccatctggaagttattacacatccatcatcggatcaatcatcaatagactcaggattgagtacttatggagaatgatcactggtcaaggacctatgatgtgttatactttaggtgatgactcactggttggagataaccagttagtaacaccgtccaagattgaagttttcgccaattcacataattggtacttcaacgctgaaaagacggaatattcgagagtacccgaatttgtaagtttcttaggaagaacttatagaggaggtatgaatgttagagacttgaagaaatgtctcagattattaacatacaccgaatatcctgttgaatcaggaaggatttcagcctacagagccaaatctatccacgaagactcaggtaaactaagtcaaacgattggaagagtggcacagcggcttgagcgtcattacggaatggcgtcggaagacgaagttccatcttattttagaagatatgtacctttcatgtaa

SEQ ID NO: 1357 - DNA, 1716 bp, Alternaria alternata partitivirus 1
  source 1..1716: mol_type = other DNA
atgctcttatctgaaataccaaacgtttaccaacgggctctcgcccttgagagacggctccgcctgagggagctttatcctgaaggcataattccttatcttgcgagacaggaatatgccgggtccatagctggaccccgcgggccgtcggctaccgtcgcaccgagtgtgacgactagttttatcgcaaaagctccgcttagcacttactctaagcctgagtacaccctagagtgcactgagaccatgcagtaccttggaaagatggatcattatgctttcaataatagtgttcccaaattcgatccttggttccgtcacgttctcaagtccaaagcaccagacgttgtcctccaccttgaggaaacgtatcaacgcgacccctgcacccctgaacgagtcatgaagttcatgaaactttttgatcgtcggtggaagcgcatgcctactggcaatgtgatgaagcaggcaaaagagatagtaagtgagatgttttccaaagtcggcaaagtcgatcctatcgacttcaattacgctggctggcacgaaatacttcctcatctcgacatgtcctcttctcccggccttcccctccgacgagaatacgcgacacagggcgaatgtcttggccatatctatgataagacaaaacgcctcaaccacttcgcaaagttcctccaccccggtgctgtccgcgcccctccgtgcatgatcggacttcgaccaggccttatcaaaaaggctgaaattgatgaaaagatcaaagctcggggagtttgggcgtatccagctgaagtcaaagtcattgagatgcgttactgcattccattaatgaaacgcttctctgagatgtttggcaaaacaccttaccctgtcggtcgtaatatgacaaaggctctgccttttatcatcgaccatctcttgcaggataagaagtttggcctcgttactgacatttcaaaactcgatacctctgtcggtcctgattggatagattgggctttctctcagctcaagtccttcttcgacttcggtttcacactttcgtcagaacggcgtgatagcaatgtcttcgactttcttcacttctactttaaacgcacacctattctcttaccttcgggccaactggtcaagaaggctggtggcgtcccgtccggttccggttttacccaactcgttgacactcttgttacaacattggctactgtttactctcgtcttagaatgggtcacacaaaagaccaaatattcaagatgtttgttgttggcgacgatatggccacatctgtcgaccacgatttctctatcgaggagttttcccacatcatgggccagctcggttttgaaataaacccttccaaagtcatgttctctaacaagggcatagaactcaagtttctcggttactccaaacgtggtggtggcctttatcgcccaatcgaggaactcctccaaactgctttctttcctgaaaagtatgttggaaacccaaatcgttcacgtcaacgaatactgggtcaatccattgctgcagggctctccaattcattcttcgacaaatgtaactattggatggaagagcttgttaccctctccagtacattggatcctgacgaagttttcatcccacagaaacgctggatgcgaaacgttctctccatagacgagatgcctaaatcggcaaatgtctacgacctctttcacttggtttaa

SEQ ID NO: 1358 - DNA, 1530 bp, Alternaria dianthicola partitivirus 1
  source 1..1530: mol_type = other DNA
atgagcttatcatctgatgaaaacacaaccgatctcgaagatgttctagcaacggtagaactgtttgcgatgtcagacccttcagcaaggtcagcccgcagacatcgagccgccggtgcgtttaccgctctccctgggttaaaagagatagcgcgttacggaggttactctgtttatcgctcgccccagaacacggatccgttcatccgtcaaactctaaaactattcgaccctgacctttacggtaacatttacggttttactcgtcgccccacaggtgtagaaggaatgtacaaatccttgaacatctttggtgaagagcgaaaagagttttccgatcttaccgtatcacagcgtgtcgccatgaaaaccgccatcggtaaagcgcggtctgctttcaagctcatcaataagcatgagcctctggattggcatgaagttggccaatttatgaagcgagacacctctgctggagtatcctttcctggcaagaagaaaggagatgtactccctcagatttacaccgagggcaggtggcagggccatcgcatgaaacaaggtggaaagggaagatttgatccccgcaaagtcaggtttcccccctgtcttgcaacacaaagaggtgggctttcagaggtcactgaccctaagacccgcctcgcttggatctaccccgctgagatgcttatggtggaagggctctacgcccctgtcatgtatagggagttcgaaaagatgccaaacagccccatgctcatcgggaaatccagtcaacgcttgtttaccgagtgggtggctggtgctagggatggtatgaaattatacggccttgatttttcgaagtttgacagtcgcgtgccagcgtggctgattaaaatagctttcgatattcttcactctaatgtagactggctacactggaggggcaaacctacatccaaacgttctcgacaaaagtggagaaacgtgtgggatggtatggtgtggtattttatcaatacgccaatactcatgcctgatggccgcatgttccggaagttccggggagtgccatctgggtcgtggtggacccaactcgttgatagtgtgatcaactacatcctggttgaatacatggcggcgtgtcagaacgtcaccatcaagagtctaaaagtactaggcgatgacagcgccttcagttcgtgtgtcgacatgaatctgtctaaagccgcagacgatgcgcatgccgtgggaatggttcttagcgtggagaagtctgatgttgtggaggatccaacacaactgaagcttcttggaacgacgtaccgaaacggacatgctcacaggcctcgtgaggagtggttcaagctagccctctatccagaaaacgaggtgaaagatgtcgaaacatccctgtccagactcatcggtctttggattggcggcggaatgtgggatacccacttctcttctttcatgcattatacttccagcgtgcttacccctgtcctagtgaaggctggttcacaaaggatcaaagacgttggctag

SEQ ID NO: 1359 - DNA, 1611 bp, Alternaria tenuissima partitivirus 1
  source 1..1611: mol_type = other DNA
atgagcttgtcatctgatgaaaacgaaacctcaatcgacgatgttctagcaacggtagaactgttttcgatgactgatccttcagcaagatctcgtcgaagacatcgagaagcaggtgagtttaccgctctccctgggttaaaagagattgcgcgttacggaggttaccctgtttatcgctcgccccagaacacggatccgttcatccgtcaaactctaaaactattcgatcctgacctgtacggaaatatctatgggtacacgcgtcgtccaactggtgttgagggaatgtctaagtctctcaacatatttggtgaatcacggcgtgagttctctgatctttcccagactcaacgatcggccatgaaaaccgcaatcggtaaagcgcggtccgctttcaagcttgttagcaagcacgaacccctcgactggcacgaggtgggacagtatatgaagcgagacacctctgcgggagtatcctttccgggcaagaagaaaggagatgtactccctcagatttacaccgaaggcaggtggcagggccatcgtatgaagcaaggtggcaaaggacgatttgatcctcgaaaggtcaggtttcccccctgtctggcaacgcaaagaggtggtctttctgagatctctgatccaaagacacgtcttgcgtggatctacccggctgagatgcttatggtggaagggctctacgcccctgtcatgtacagggagttcgaaaagatgccaaatagccccatgctcatcgggaaatccagtcaacgcttgtttaccgagtgggtggctggtgctcgggatggcatgaagttgtacggcctggatttttcaaagttcgatagtcgcgtgcccgcgtggctgatcaaaatagcatttgatatccttcactctaatgtagactggctacattggaggggcaaacctacatccaaacgttctcgacaaaagtggagaaacgtgtgggatggtatggtgtggtacttcatcaacacgccaatactcatgcctgacggccgcatgttccggaaattccgtggagtgccgtctgggtcgtggtggacccaactcgttgatagtgtagtcaactacatcctagttgagtacatggctgcgtgccaaaacgtgaccatcaagagtcttaaagtactaggcgatgacagcgcctttagctcgtgtgtcgacatgagtttgtctaaagccgcagacgatgcgcattccgtgggaatggtactgaacgtggacaagtctgatgttgtggaggatccaacccaactgaagttacttggaacgacgtaccgaaacggacatgctcacaggcctcgtgaagagtggttcaagctagcactctatccagaaaacgaggtgaaagatgtcgaaacatccctgtctagactcatcggtctttggattggcggcggaatgtgggatacccacttctcttctttcatgcactacttccaacgtgcgtacccttgtcctagtgaaggctggttcactaaggatcaacgacgttggctagagatagtgcatggcggaagagcacccagaggttggacatcgaagaggtccctcttttggagatcaatcttctacgttttgtag

SEQ ID NO: 1360 - DNA, 855 bp, Amalga-like boulavirus
  source 1..855: mol_type = other DNA
cagatgaagttaaaatatgattattatattgaatcagactttggtaattttgacgctcattgcactaaagatgacattttactaggtacatctattttaacttcttgttttccaaatgataaatttcattcaagaattaagtactttattacttcctcacttattacaaaatatataccaattccaccaggtatagttattgaatgtaataaaggcgttcctagtggacatccatttactagtttaataactagtactattaatatttgttattggtgttatattggatacaagatatatggaagaaattatccacagtatatggaccttgtagtttgtggtgatgatgcgaatgtattcttcgtcaataacgataaactttctaaaattgacttaattattgaagaaatggggcttgtaagtgataaaattcttggtaaatttcaaccgtgtaaggagtttgataaactacaaaacacacctgattttttgaaaagatttaatgattatggttctgtacagtggaatattaagaaaacattacagaagttaatctatcctagtagtaatagaaacaagtcagagtatttgttaattattgaaaattatatattaactgcaccacatcaagaagaatttaataaatttctatttgaagtttataaatactattgtgatgatcacgaaaaaattagaattttagaaagaaactttgaaaaatcaagtgaagagtattcagttccaaataagattctaagtggttatatatatgaaaaaaatacaattaacaggaatcttatttttaaaaataagattcctgttaattgtatttttttcatatatataaccacttag

SEQ ID NO: 1361 - DNA, 1659 bp, Amalga-like chassivirus
  source 1..1659: mol_type = other DNA
atgaactcgaattggaactctattccttccgaattaagggatgagtatataaaccagcttattaactatcgagttgtgatttcaggttcttttactacgaaccaacagagttttattgatatgtcaaatggtaacgacaatagtaataagattaaagctgaagagtatttggagtatgtcttgctaacagatttatacggactaaaattagcagtggtagacaaagatattactcctgacttactgaagcatgtgtacctcaatagtgatagctttcccggaataatgactgagaattacttcgggagagaaagaaaacaaacaattcagtttactctacctatagctgagcaattgcttgaagtgattaagaataagtccgttaaatattgcgggctttggaaaatattaggccgtgagaaagacgtcaaattaacacctgagggtgttcttaaaggtactcgcccagtattggctccagaggagctcttgaatctaattggtggtctcattggccaattagttactctcggattgcggtctattgatgacaacctattctttattggtaagtcattcgaaagaaaggcttttgaatcattctatgagaataataaatggttcgatgtcatgtgctctgaggattttataggttttgataaattcgtggatcgtgaacttatattaagcgcttgcgcgataatcagatcactgctgcccgaagataagcagtacgatagaataatgtatttcttagcaactagccttatacataaacatgtggttgcaccgcctggtgtaatttacgaaatatccaatggcttgccctctggacatccactcactagtttagtaggtaccctaataaattacatagtctggaataggatattatgcaaagtgtatggtggttcacatgatataaatacaggaaaaccgaactggaagagtagattttgtggtgatgatgcccaacatcttcttaaatacatttctaacttagcaaataagatagaaagagcatttaaggacgattgtcctttatcaatcgaaccgctacagcagaacttttatccaatatcatcccgttgccctgaatttaatgctaaattcctgaaaagatgcgttaattcggatggtatggtctattgggaacgggcttccataatgaagaaactattatatccgcctattgagaagaaagattattttgaaatgcgcgaatgggttaaccattggattgaagctgccccaggtgacctagccatgaatgatctccttcgtggatacttgatgtttataggcattaagccactaggtgaagtcttcaagaaagagcccgttaaactaagacaaagtttagctttaaatattctagaggaagttactttgagggggttactcagggtcggcacggagcgatgggaatcaactctagttgtctccaaaccccgcaagaatgttcaggcttgctaccttcctctagtaaaaacaatgattcctacacgtgacatccagactttggctcttacgtcaattatggattcacgacaatatttaaaatacatacaggaccccgttacccgtgaattattgtcaggaataattccgagtattcagaggtcccgtcccccgcctcgactccgcaaaccccactag

SEQ ID NO: 1362 - DNA, 1689 bp, Amalga-like chaucrivirus
  source 1..1689: mol_type = other DNA
atgcctgcactccaaattagtgatttagatactatttcggttaaccctaaagcacatcctggttattttactaaaatgttctttggtgataagagggaggatactataccttactctattaaagtctctagacagatttttaatcacctaaaaacaaaaaggtttaaatggcaaggtttatggactttagggggtagatctaaagacattaagctcacacaggagtatactgaagaaattggtacacgcgcgatctggataccagaagaacctctggtaccattatcacttattgtggtgcaacctttcacaaaatacctacagaacattgatagacattgtcttttcgttgggaaaaacttttctgtcaaagaaaataaatggttttctagattgaattccatttatccatgggctatgcgttgtgattggaccctatttgatgcacacgtcgatagggagatgattttggcagcaatgagtattatcagatcatgctatcctaatgatagattccatacacgttatttttcctttttaactgatactatcattaataaaaatttggtcgtaccgcctggttttatatatgagtttaattcaggaatgccttcagggcatcctttagttacgctcgtgaatacattagttaattatcttgtgtttgtaaaaattttacaaaaggtttatggtaagggtaaagttgctgagagatgttatgctttattttcaggcgacgatagtcgattttttctacagatgcacccgaacctatttaaaatagatgatataatacgaaatactactagtcttgaaactgattcagttgttaaaagtttagaacctgctttctctagagattatgaggaacaggatgttagatttcttaagagatatgttaatagctttggtatagtttcttggcatacatcctctatgttaagaaaatttttatattccgataagaaaatttcagggatttttacttcaaaaagatggatctgcagtttactttacgctgcgccgggtaatagtaaacttactgaattcttcaagaaatatcttaagtttcttgagaagaaagaccataactttgttaaattaagtcataataataaaaagaatgctgttaagtacatatctgagtctttactcgaggcggagtctgtcggtttgtttgcgcagattgctagtgagaaacagatatcgtcaaaagataaaatgttggtagaaaattttatggagaataacgaaagagttacgatctcgaagatgtataatagggtagacgacgaaattagtagtgctctttttgtccttcagggattacttagtacggggggtcgtttttcagctcaatgctttgatacttcgataagcgttttatctaataaacttgaagatcctaaacttaaacttatacctaaattgagacaatccttcttatttagaaaatataaattatctcagttattcagggtattaggtaaaagggctgtggtgccaaaatcactcaatgaactaattaatgattgggaagggccactacataatgaaatgttgtctctactttacgatttgttcaaggagccaagaacactgctaggagccaatctatataacccattgggtaggttaactagacaaggcgtactaggtgaactcaaatcgatacatgatacgagttaa

SEQ ID NO: 1363 - DNA, 2151 bp, Amalga-like dominovirus
  source 1..2151: mol_type = other DNA
atggacttagttagttttatacaatcatcgttttcgatatcttttaggaaaaagacgtacttcccttttatacataggctcaggaaaattgggttttataagttacccactttttgttcggagaatcatatgagctatatcaaatattcatataaaaaattcaaaacatatggtggtcctttaaatgagtcttcagtgtgtaaacttatcggtgcaaccccgaattacgttggttttgtccccagtcgtcgacgtcagatgaactatcgtttcgctcgtttcttatctaatactcagatgagtgacgaggttcgtaaggtcttactaacgcctagacacacttggactggtggttatgactcatatcgccacgtcctaaatgagtttactaaaccatctgaatttaattatacagttgagcaagtactcgacattttggaacaggaggactttccctggcttcgtctccctaagatggattttcctaaggttagtgaactcgaaaatctatacgttaacccctctgcacacccaggtttctttacgcgtgctttttttggtgaaacgcgtagagagactttgtctacttcaattcatgtggcccgtgctatgtataatcatttaatgaacaagccactaaagtaccaagggttatggactttgggaggaagaagtaaagacgtcaaactttcattagggtacacggaggatgtctcgactcgcgcggtctggattcctgaggagcctctcgtgttattatctctattgatcgttcaacctttcacgcgtgcgctgcagaaaattagcggcggttgtatctttattgggaaaaattacgatttttcagaggccccgtggtacagtaaacttgacgatctatatgacgtctccttcaaaagtgattggtctttatatgacgctcacgtccctaatgaagttattctggcggccgtctcaatcattcggagttgttatccggatgatcgtcacgtcactcgtttcttttcctttttatatgatacaattgtatctaaaaacctggttgtaccgcctggttttgtttaccgtgtcgataagggtatgccctctggtcatccccttgtcagtcttgtcaatagtattgcaaattatatactctgggttatcatacttcgcgaatctctaggtaaaggaaaggtctcatcatctacgtacggtgtcttccatggcgatgattcgaaaatatatgctaaatttactaagaatctctacaaggtggataacgttattagagataaaattcatatgccttgtgaccctgttatctcttcaatgtgctttttgtctaggcattccattgatcgtccacacgtgccttttcttaaaagatacgtcgatgattatggtatatcttgttggtatgccccatcctttattaaaaaattcatatatactgataaagatatctcaggattacactcaaaaatgacttggtttttctctaatttagttatggctcctggaaatgactacctcgccggtttattttatgatttctttagggcggaaatcaggcatgcttatagaggtgataaagaaaaagtcgattatgagttggagcaatttgatcatcgttttagaaacacatatgagttaggattaaaacatcagatgtgtgataaatctatcttttctgttgattctcatgtcttttatgataacttttatcaaggtgcagttcgtgtccacatcagtaaagttttgagatcttcagccgctttggaatttagtggtaattctcttgtgcagggttatctgctgttttccgatacggcagtggatcgtggtctctatgaacttaggaaaaaattcaatagtttcctttacagagaacgtttgaaaccattggctaaacgcgtcttaccgtcggtccttgaacgaacaggcgtctcgaaaatcgttaaatacttcgagattaacgagatgtttctacccggtttagaatgggctaaaggcagattagttgaccctacgtacactcccgtttttgagtatcttgccgctttgtcaatccaagaaggcagagttaaagatgcacgtaaagtgcctaagaactggaataatttcttgaaaaattggagtacctttaagttttattatgattcttcataa

SEQ ID NO: 1364 - DNA, 1521 bp, Amalga-like lacheneauvirus
  source 1..1521: mol_type = other DNA
atggctcagggtaatgataactcaaataaagtatctgctgaagaatacctatcatacattattagtaatgatctttataatctccatctccatgtaatagatcatgaaattacttcagacttactaaaatttgtagaagttaatcctgactcatttcctggaatcatgactgaacattattttggatcgtcaagatttcagaccttgcctaatacacttgtagcagcaatggagttacatgatgcagttatgcaaaagcccactaagtattgtggtttgtggaaagttttaggtagagagaaagatctcaaattaacccctgagggggttatgaaaggcactagacctgtgcttgcgcctgaagagattttaactcttattgctggactttatggccaaatcattactataggtctcaggaagataaaagataatcctttctttattgggaagtcttttgaaaatcgaagtgttgaatctttctttgagggtaaagctgagttcgatttcattattaataccgattttgtaggatttgataccacagtcgatagagaatctatgttgtgtgcgtgtgctattcttcgttcactctttccctcttctcgtgagtatgatcgaatgtggtttttcctagctacaagtttaattaataaacaggtagtctttccaccaggtattatatatgaaattaataatgggttaccttcagggcatccacttaccagtttagtaggtacattggtaaattatatccaatggaatcgtgctttaacacgtgcttatggtgagaaagctgtatcttctactagatatttgtggaaatcacaatactgtggtgacgatgctcgtcacttattagttcgtgtggataaaatacttgataaaatcaataagatttttaaggaagaacaaccttgtattattgaagatgttcatgattcaatttcaccactcccatcttctttaattggttataattccaaattccttaaaagatgctcaacttatgatggcctcgtctattgggatcataaatcaataattaagaaattgatgttcccatctagaaattttaaatcatattttgaaattcaagattggatttataattggatagagactgctccttttgactatgaaatgaataaatttctaactgattatttattatacctattaagagatttctattccgaaacatataaagaaatacctttctttaaaagaagaaccttaatcactgaggatcttaatgatataataatcagaggataccttcgtatacaaactaatatgaaatttttcatgctgaatattcatagacctgttagaaggaaagtagtatctgaaatggtctccaacgttactccagtaaactatcctgaaacacagctcatacttcttactttaggggtagatgcattccaaatattaaagcgtatagatgaaaacgctttaagacataaaattcttaaagtccgggaacaactgattcgccggacgaggaagccgccttag

SEQ ID NO: 1365 - DNA, 1434 bp, Amaranthus cryptic virus 1
  source 1..1434: mol_type = other DNA
atgacaacacgtacacttaacgggtatgagtacaccaattttacttccgaactggaagaaataggaagatttcacttacaccaagtccgacgagagccgggcgtcacgtatcgtgatgagttcgttcttaaagaactcaatgatacacatcccattctatatgagcaaatacttgagggttggtccaggagttattactctggagaagcacacttgaacgccattttagagtatgggaatccaaacattacaccaacattagaagactctgagatttatcaacaagctcggactaatgttgcagaattgttgcgtagccttccacgagcgagggcattcgatgttctaactgagttagatctcattaattacgaatcgtcatcatcggcgggttacgactacaatggtgcgaaaggtccaataggtggtccaaaccacacaagggctatccgcagggcgaaagctacgttatggtctgccatcagagatgagcacgaaggtcctggtcatgtgatcagaaccgccgttccagacgtcgggtacactcgcacacagctaacgaacgttagagagaaactgaaggtaagaggagtatggggaagagcattccactatatcttgttagaaggcacatcagcagatccactgctacaagcatttaagcaaggcacgactttcttacatattggttccgatccaactgttagcgtaccatatattttatcggaaacagccggaacatgtcaatggcttatggcacttgactggagagcatttgatgcatcggttagtcgttttgaaatccacaccgcttttgatttaatcaaagagcgaatcgattttccaaatacagaaacggaaagttgctttgagatttgtcgacaactattcatccacaagcgtatcgcggctccagacggtaagatttactggtcacacaaaggtataccatcaggtagttacttcacatctattatagggtcagttgttaacaggttaagaattgaatttctttggcttaagctgaaaggacgtagtccgaaggtttgttacacacaaggcgatgattcactcatcggcgatgacgactatatttcaccagatgatttagcgcaaatagctgaaccattaggctggacgctcaacgcagcgaagactgaagtttcaaggatgccggaatatgtgtctttcttaggaaggactatacacggcggattgaaccaaagagacctaacgaaatgtattaggctcttagttttccctgaatttccagtagaaactggaagtatatcagcatttcgagcgaaatcaatttcagatgattcaggcggcacaagcaggatactgaatgatttagcccggaagctaagacgaagacatggagttgctccagaagaagcagttccgaagagatttaagttatatgttccatag

SEQ ID NO: 1366 - DNA, 1443 bp, Amaranthus cryptic virus 2
  source 1..1443: mol_type = other DNA
atgtcaaccataaacatttctggatatgagttcacaaactttagaagcgattttgaagatttacaacagactcatacagaacaggttcaaagagagcctgaaactacatattttgataacttcgctaaagaggagttacttgatatgtacccggagctttatcgtcaacatatagaaggctggtcacgaagttactatctacgtgaaaagcacatggaagcgatcatgcagtaccggataccaaacacaccattaaaccgtctcgaccaagaggtatggcaagaagccattgaagcggtgaagaatgagttacgtagccttccacaatcgagggcgttttcagtaatagacgagttagaccaaatctactacgtccagtcctcagcagctggctacggttacattggtcctaaaggtcccataggtggcactaaccacatgagagcaattaggagagccaaggcaacactttactcagcaaccgcaccagacggagagggcattgaacacaccatcagagaatcagttcctgatgttgggtatacacgcactcaattagcagatcttaacgagaaaaccaaagttagaggagtatggggaagagcatttcactatatcatcttagaaggttcatcagcgagaccactgttagagaccatcatgcaaggaggcacgttcatgatgattggatgcaatccagtcgctgacgtcccattagcattgtccgaaatttcatctaacccacaagttagttggcttatggcccttgattggagccagtttgacgcgacagtaagcagattcgagatcaacactgcttttgatatacttaaagagaaaataacatttccgaatttcgatacggagatggctttcgagttatcaaggcaactgttcattcacaagaagattgcagcgccagacggacacatatattggtcccacaaaggaattccttctgggagttattacacttccataatagggtccatcgtgaatagacttcgcatagattatctatggagattcaagttttacaacagtcccattgtctgtttaacactaggagatgactcactagttggaacagaagagtactgggatccaaacgagatcagtcaactttcaaacgagttgaattggaacctcaatccaagtaagactgaatgttcaactatgccatccggagttacattccttggacgtacttcaagaggagctcaaaatgaaagagaccttaaaaagtgcctcagactagcattgctacctgagtatcctgttaccgacggcaggatttccgcatttcgtcttcaatctatctatgaagattctggagcatcaagttccgttcttcttcggatagcgaggagactccgaaccaaatacggtttcccatcacccgatgagattccgcgtctgcatcgaccttacacattcatgtaa

SEQ ID NO: 1367 - DNA, 2205 bp, Amaranthus cryptic virus 3
  source 1..2205: mol_type = other DNA
atgcctttcaaccctgttcgcaactaccttgccgagcgccttgctcgtgtaaaagaagaatggaagacgttcgagtctactcgccgtaatccgtctctgactttacaacggattcaagatgccgatatccgccggttttatgatcgtgtgagatttgatccaatgaatgaagttaaaacaaagatgtttaacaaagagtactctactctagttgaagcttttcgtttacgtaatgatgaccgccatcaaccgtatgaactccatcagcccatcccccaagatgccgctccgatccctgactcccgccaaccagcccccggaatcaaactcgtcccactaatgtaccattatggccgcgttgttcatcccaatcctatgacctccaagtcagtcagaacttctgatgatgccgaactacctcccttatacacgtatggagatattgactatggtgaatctattgatccaaagttatataatctcattctgaatagataccctgagtacctatttatcgtggataagtactgccgacccgctggaactacggatgctacattccgtgatttcaacaaggaacagatacctatcgagcaggtaatgccagaaagaaaagagacaattctccgtctcgtcaaacactttcttgatgtcacgccttatcgacctgtccactttgtcgacacccagtactgtaagactccccttgcaactggaacaggctaccacaaccgatactctttcaaacaaagagctcatgccaagtactctcaccctccagagtatgccagccgtcctacctctaaaggttatttttataatgctacctacgagaacgcccgaactttaatccacaagattaaggatattggagttccatttgatgtgggtcccgatatcaacgaagaagagatgattaaccgtcttaataatttctttaatgattatccgacgctcctgtttacaagaaatcacatatctgaacgagatggtgtgcttaaagtacgccccgtttacgctgttgatgacttctttctattgattgaacttatgttgaccttcccgttaacagttcaagctagaaagccttcttgctgcataatgtatggcctcgagaccattcgtggctcaaaccattatattgatcgcttagcgaagaagtactctacctacttctcaattgattggtcgagctatgaccaacgtctgcctcgcgttatcactgatatatattacactgacttcctccgaagtttaattgttattaatcagggataccagccaacttatgaataccctgagtatcctgatctcgatgaacataaactgtacaagagaatggataatttactccatttccttcatttatggtataacaacatgacattcctctcccaggatggctatgcttaccgccgaacttactgcggtgtaccatccggtttatacaacacccaatatctcgattcattcggaaatctttttattatgattgacgcaatgctagagtttggcttcccgcccgaaaagatactggaattccagttcttaattcttggcgatgacaatactgcaatgaccgctatggacattgaaattgtcgatccgttcatcaaattcctagagaagtacgcacttaagcgctataatatggtgctttcactaaccaaatctttattgaccactctcaggtccagaatagagacgctcggttaccagtgcaattatggtaatccaactcggaacgtccacaaactcgtagctcaactatgctatcctgagcttggactgcgcccacacactatggctgcccgtgctattggaattgcttatgcttccgccggacaagatattaccgtccactctttctgccaggacgtatacaatatctttcgatcagaccaccgacccgatcctcgtacaacgctgtttcttcacaggaatgttttccacaatcttgaagaaggaataccgaatctcgagactcaagtcgtcccaccgttcccgtcactgtatgaaatcagacaacactattcgaagtatcaaggacctctgtcttatgatccgaagtggaattatgctcattttgtgcactcaccggacaccgtggatccctttgcgaagactatgatgcaatacgaaaaggaaatgaacctccctgttcgtcaagctcctacttttccaacggtcgtgcccagcacgtaa

SEQ ID NO: 1368 - DNA, 599 bp, Amaranthus cryptic virus 4
  source 1..599: mol_type = other DNA
atgcctttcaaccctgttcgcaactaccttgccgagcgccttgctcgtgtaaaagaagaatggaagacgttcgagtctactcgccgtaatccgtctctgactttacaacggattcaagatgccgatatccgccggttttatgatcgtgtgagatttgatccaatgaatgaagttaaaacaaagatgtttaacaaagagtactctactctagttgaagcttttcgtttacgtaatgatgaccgccatcaaccgtatgaactccatcagcccatcccccaagatgccgctccgatccctgactcccgccaaccagcccccggaatcaaactcgtcccactaatgtaccattatggccgcgttgttcatcccaatcctatgacctccaagtcagtcagaacttctgatgatgccgaactacctcccttatacacgtatggagatattgactatggtgaatctattgatccaaagttatataatctcattctgaatagataccctgagtacctatttatcgtggataagtactgccgacccgctggaactacggatgctacattccgtgatttcaacaaggaacagatacctatcgagcaggt

SEQ ID NO: 1369 - DNA, 1851 bp, Ambrosia cryptic virus 1
  source 1..1851: mol_type = other DNA
atggctgacatacctcatatgtatgataaactaccgcaatggttcatcgctcccacaaacctcgaacacgtcggagactactctctcccgcccggaataatgcgtgttaactcagtggctataactaaccacaaagcaacactggatcgatcgttttctagatacctctacgaacacgagatcaactacatcacttcagagcatcgcaggtcagatattgactacgactctattttggaagattttctttcaggtgacattccacctttcgagataccctttgactcacacgtcgaaaacgggatcagatgcatggttcaagctttccaaccacctaggccctgccgaccaactcacatattggacgtgcaatctagctacccatataaatggaacgtgaacgcagaaccgccattctcaacagatgattattttctcaaaacgaggaaaacatttggcgaattcatacaacaacacgagtatgaacacatagataaagacgatttctttcgtcgccacccaaactacgaatcacatgacctgatacgaacagtagtcccaccgaagttcggctacatgaagtcgacgatattcacgtggacacgacgctggcaccacattatcaagtctggactcaagaacgacactggtctggcaaccaccggttacttttacaaccgatttatctttcccatgctactacacacgaagactgcaattgtcaaaaaggatgaccctaacaagatgcgcaccatttggggcgcttccaaaccctggattatagctgaaacaatgctatactgggagtacattgcgtggatcaaactccattctggagtcacacccatgctctggggctacgaaacctttactggcggatggttcagactgaatcatctattatattgtggactactcaagaaatctttcttgaccctcgattggtctagattcgacaagagatcttacttttctcttatttacagaatcatgattgccactcgtaatttcttcacttttgaagaaggatatgtcccaacacacgcagtcccatcacatcctaactggaatcgtgacaaagctgaccgattagaacgactctatatctggacgcttgaaaacttattcaaagctccaatcatcctacctgacggtagaatgtttagaagacgttacgccggcatcccatccggtctattcatcacacagcttttggattcctggtataattataccatgcttgccactcttctgagtgctcttggcttcaaccctgatctctgcatcatcaaagttcaaggcgatgactctatcataaggttatcgactctgatacccgaagaagcccacgtcaagtttatgtccaaacttgttgaacttgctgaatactatttcaatgcaacgatcaacgtcaaaaagtcccagatttccaacaacctcaacggatgcgaagtcctgtcttaccgtaaccacaacggtctacctcacagagatgaaatcgctatgttatcacagttttaccacaccaaagctcgagatccaacccccgagataacaatggcccaagccattggatttgcgtatgctagctgcggcaaccacaaacgcgtactctgggtacttgaagacgtctaccgatactacaaggatcaaggctacacacctaaccgtgctggactctctctcactttcggagaatcaccagatctcagcatgcccgagataccacttgatcactttccaacagtcaacgaaattaggcgctacctaatcagttcgacctacatcaacgaagcacaaaacgctcgcacttggcctctttctacatttatttgtaaaccggccgaataa

SEQ ID NO: 1370 - DNA, 1455 bp, Ambrosia cryptic virus 2
  source 1..1455: mol_type = other DNA
atgtctgttagcacaattaacatcagagactataggtttacacagttttcaagcgaccttgaaagattaaaccaaagacactctgaacaactcagacgagagtctgaaacaatatatgaagatcagttcgctaaaaccgaactactcgacatatcaccgcgtttgtatgaaacgtgcattcaaggatgggccaggagttactactcaggcgataaacatctagcagcaatcatgcagtacgcaacaccaaacatccctatcaaccagctaaatcaagcgatctggacagagagcattgaagctgttagacatgggttacgtagccttacaagagtgagggcttattctgtaaacacagaactgaaatcagtacattacatccagtcttcatcggccggctacggatatataggagcaaaaggtgagccagacggaacgaatcacaacagagcagtttctcgagccaaagcaactctatattcagccatcagatccgatggtgagggtatcgattatgctattcgagagtcagttccagacgtcggatacacccgcactcaactagcgcacatcgcagaaaaccaacttaaggttagaggtgtatggggaagagcattccactacattttacttgagggtacagcagcaaaaccgttgcttgactccttccaaagatctaacacttttgttatgataggaagcgatcctgtgactagagttccagagattttatctaaaatttcggatgacggtaaatggattatgtccattgattggagtcaatttgatgccacagtcagtcagtttgaaatagaaactgcttttgacattttgaaggcatttatcgacttcccggattttgacaccgaaatgtgttacgagttttgtaaacatatgtttatacacaagaaagtcgcagcaccagatggatttatttactgggcacacaaaggaattccatccggaagttattacacttctcttattggttcaattatcaacagattgagaattgaatacttatggaggcttaagtttgacgaaggaccgaacgtttgctacgttttgggtgatgactcactcatcgcatacgacaggttttacgatccaaatgaactagctgccgaagctttcaagcttaactggcttatgaaccctgagaagacggaatattcaactattccaaacgcaataacatttctagggcgtacagttcgaggaggaatgaaccagagagacttaaagaagtgtcttaggttactcattctaccagagtaccccgtagaagacggaaggattgccgcttatcgagctgaggcaatcgctgaagatgcaggaggcacgagcgaagttctcaacacgatagctaaaagactcaagaggatttatggagtagctttagaacatgaagtacccattagattaagacgttatcaatttgcaattaatatgtaa

SEQ ID NO: 1371 - DNA, 2127 bp, Aplosporella javeedii partitivirus 1
  source 1..2127: mol_type = other DNA
atggtcctcaacaacgtccgaaactacctcgctgaaaaatatgcacgtctcacaaacgaatggaaactcttccaagttcaccaagcttcacctcccgatgtccttcaagcacacaaagattctgatctcgatcgtatctatcgctctctccgttatgactttactcatcccgaaattgaagaacaatataaaatgcaagctaatcattttgaaactattttcaatgaaaaatctgaacaacaaaaatttcctgccgaattttatcttccacgtgatctttcaacgctccctactaacagaattcctccctctggtatttctgctctgccctatgctttcaaagctggacaaatcgtttctgctacacccgaagttcctgaatctggttttcatgtcgatcctcgaatcacacgtataatcaaacatttctaccctgacttcatgtactacgttgacaaatacgttcgccctctcggaacaacagatgctactgtcaaagacttctttaagacacaaactccctgtgctccaattgatccctcccgtcgtgacctcatcattgacttaatcattaagaaactggatattactccttatcttccaattcattttgtcgattcactttatgatggcacccctctccacactggaactggttatcacaaccgcccgtccttttcgatcaatgcacacgctgtattttcgcatccccccgaatacaaggaacgccctacctccaaaggctattattataatgcttttcttgaatctgctcgatctttaattcactacattaaatcaacaggttttccgtttcctactccaccaaaggatttacacgaatcacttcgtcaattctttcttgaacgtccgaccactttatatactcgcaatcacatttctgaacgtgacggtaatctcaaacagagacccgtttatgctgtagatgatcttttcatccgaattgagtctatgctcactttccctgcacatgttctcgctcgtaaaattacgtgcgcaataatgtatggctacgaaacgcttcgcggcgcaaactgcgaactagaccgtctcgcacaagcctactcgtcattctttactattgactggtccgcttttgaccaacgtcttccacgcgttatcactgacttattcttcactcattttcttgaacgaattattgtcgttaatcatgcctaccaacccacctacgagtatcccgtttatcccgatctcactgccgataaaatgttccaacgtctccaaggccttatctccttccttcatacttggtacaataatatggtattcatcactgccgatggcttttcctatgtccgtcacttttctggtgtaccttctggaatgctgaacacccagtatctagactcttttggcaacttattcctcataattgatggtttaatcgaatttggcttctctccttccgaaatcgattctatcattctctttgttatgggtgatgacaattctggatttactcactggccccttctccgtctgcaaatattcattactttctttgaatcttatgctctcgaacgatatggaatggttttatccaaaaccaaatcaatcattactgctatacgcggcaaaattgaaactctttcctatcaatgtaattatggccaacctctccgcccaattggcaagctagtcgcacagctcgcttatcctgaacgtggccccagacctaaatatatgtctgcacgcgccattggattagcatacgctgcttgtggttcaaatgtcagatttcacaacttatgtcgtgacatttactacgaattcctcgacgatgccgccgatcccgaagacccacttactttcaagttgatgcaagaacacctacctggtttcttacgtatcgatgaatctgtacgtcaacaaataaatttgactgaatttccgtcaattttcgacgtccgtgaacaagtttcacaatggcaaggtcccctcccttttcaaccaaaatggaacctcgctcatttcatcaatcaacctgatgttatcccgtcttccgcaatcacaatgcaacaataccgtactcagaatgcaatcccgcatcctgaaatacctgcactgtggacgcaacaaacttag

SEQ ID NO: 1372 - DNA, 1797 bp, Apple partiti-like virus 1
  source 1..1797: mol_type = other DNA
atgtcaattcatcctgatacggaccctttcactcctattcctggggtagacaggcttcgtaaatacaactctcaagccaggagtaaacgcctggctgaagtgttgtcgtcgttgaacagagccgttgttaaaccagcgactgatgctcacaacgtgtcatggctgcttgaccttggtgtctcctttaaaccagaggagaaccgaagtgtcacaggagaagactgggcgttcgaatccctacgaaagtatgggaaacagcccactacggccggtttttcggtcggagacggacgacgtgcaaatctacacccaacaacaggatcgactggaggagacggaaccacccaaggttccattgtacgtgcacgtgccagtgccgaagacacgcgacgatctggatcagtacagtccaaaggacctgttcctagcgacttacgctctccacacaggggagttgcctccggagttcgagtcgatggagttaaggctggcgccgtcggcggaccgtacagtagggctgcataccgagcagcgctttcttcggtccgtcgtgcactcggtgctgttggcggaaggcgacgggttttatcgctggaggtcgttgtggatacgctggtccatgacaattctttcagtagccttccttatctcagctctaatgacttggcgaaggccaaggggttacgactggctgaacgcatacgctcaggagaacggggttttgatccttatctctttggccggcgtgttcagtttggcgttcgggctggtaatggggtcgttaatccaaaaactaggctcgtttggatggcggcgatcgctacgactattttgggtcagagttattccgaaccaattcagggttcgctggctcgaaagcgtccgttcacgtggggtctcacctctgcggaacgcggagcgataatcagttcaatgcggggatctcataagttctcgtatgagctggacttctccaagttcgacgcgtgtgttccagaattcataatcatggacatctttaagttgatagctgaaaagcttgatatgacggatgtcgaagaggactgttactggcgctacgcgaacgatttcgttcactcacgaatcgttatgcctgatggttatatatatcaggtacaccagggtattccatctggtgccacgttcacgtcactggttggtagtttgattaaccttctggtgtcgaattattcgtggtttcggctcacgggcagaactttgtccaatgagcaactcttagtcatgggtgatgactcgctaatcatgtcagaccagtgtctcgaacttgatgacattgcgttaatggctgcggagctcaacttcaccgtaaacccagacaagagtggcgtgcgtgataatcgggttaaagctgacccgagtacttcgccttacttcgtcggtcatcattggcacaagggacggccaaaccgaccgaagcaggaagtcaagaagcacatctggttcaccgagaggcaccacgctcccgataaggcgtggagtttagtacgtctcggaggattcgctctgtctagcaaacagggttacgaggtgctgcttgaacttatggggcaacgatatcaaactcgtgatgtcgtagctctactgagtctgtacctatccatggtgcgacattcggcgagcgagatcgagtccggtcaatggcgggtggaatggcctggtgaaattcgcaggcgaatctacgctgaagggtgggaagctccgaagttcctcgagggcaagggcctcgacgcacttctttacggcgactcactctaa

SEQ ID NO: 1373 - DNA, 1686 bp, Apple partiti-like virus 2
  source 1..1686: mol_type = other DNA
atgaacctaccgcgtgcaggtgttgatagtcttggcacttaccgctgttcggcagaagcacgccggacactccagagactcggaaccagggtcgtagttcccgtcgtagattggtatctatggcgaaaactgcggccgcatttcccagacctcgatccgttaaaggagaaccgaagtgtcacagcgactgaatgggtggcggaaggcctcggtaagttcgggtgtcccgtccacagtgagcaatccgttcatgaacnnnnnnnnnnnnnnnnnnnnnnncgagctaacagaaacagagcaacgggacctgtccgaggccctgaaacctctggaagaagtgcgggattaccaggtcaggctaatgcttctaaccctgatcgagaaggaagcccactttccgttggagaacttgaccatcggaatgaacgaggttggggctactcacagagttcttaccagcaagcctataacgcaacgcgtcgtatggcaggcggtggcgagagaaggcgaaagcctctcgagttggacgaagtggtggcttcgcatatccatatgggccatttctctggtgctcctttcttcgctcgcaatgaagattgcgtcgtggcagcagttgacagggccagtcgtatccatcgcgggactaccagcttcgatccctttgtggctggtcgtagggttcagtttgggccttctggtccaaagactcgactcgtatggatggctccacttgctacgactcttctctctacgcgtttctcggctcccgtccattcgggactggcgagaaggctcccattcgcgtacggatattcttccgttgagaaggcagcgaggataagctccttgcaatcgaagtatcgatacgtttactccctggatttctcagggttcgatgcttcactgtccaattcgctaatccgggatgcatttagcattttgaatacccacctggagatgaacgatgacgacgaggagttgctgaacaggatcatcgacgacttcattcacactcgcttggttactccggacggcgacatgtacagagtgcatggtggtgtgccttcaggttcatcctttacgtcgctcgtcgactcaatgtgcaacctcctggtggtaatgtatacctggattcgcataacgggtcgtgctctcaccgcagatcagctgtggatattgggagatgatgtgatcattgcggatgaccataagatgaccatggccatgttagcgcaagcggccgcaccattgggcgtcacggtcaacgcagcgaaaagctcagtgacgggctattcgcgtgagagagatgccgaaccagtgcatttcttggggcattactggatttcaggacggatgcatagacccgtcagggaactggtaactaggctggttttcccagagcgttgggcgaaacagtcgaaagctaggtcgatggccaggtttgttagtatgatggccgacgcctacgagatgctgggtattgcgcaacaagtatggccaacagcagacacgtgggcgttaatctcgaagttattactcgagatcgacgaaggtgatggtgaggtcttagatatgcggtatgaccttcccggacggctacgatttctggccgttgttgagcagtcgttggaggaagaattatcccgccccggggtaaaacttccactatacggtcaaactgcttaa

SEQ ID NO: 1374 - DNA, 1722 bp, Apple partiti-like virus 3
  source 1..1722: mol_type = other DNA
atgagcacgcagtttggtatcgataatctcggtatctaccgcacgcgtaaccgtaaggtgcgcgattacctgacgacactcgaccgggaagttgtggttcccatgatcgaccggtttcttttccaggaagttcagtcgttgggtatctccctcgacgtggaaagggacaataaaagtgtcaccgagcctgaatggttttggaaaggtctcgacaggtatgcctgcccggtccacgaaagtggcaccacttccgctggaattctctgctcctgtggaaaaggtgatcgatcttcgcgaggaggtcgaggctcgggaagagcaaacggcagcagccgggctgacaccccgggaggagtggtccgagctcgaaagggcgaagaagttttgggcgtcgtcacacgcgatgacgttcggattcccaccacctcaaacgacggaagtggcaatcgaaatcattcgagagccgggtcgaggattgaccatgcagcgctcagacgagctctgcaaacagtccgtcgtgctgttttacaaaaaccgggaacgatcacacctcttgaattggatgaggtggtggagcatcaccttcgtggcgatgccgccagtggtctgccttatctcggtcataatcatgaccctggtcagaaggatcgtgcaaggcacttgggccgtagggtccttgagctggaccgcggtctcgatccttacctgtttggccgtcgggtttcacatgggcctactggtccaaagactcgtctggtctggatggcaccactcgctacgactgttgtgggaggaatgttctcaattcctctccaaaaggcgcttgcgagagtccggcccttcacttggggccacagggatgcggagaggggtgcgataatttcggagttcgacggtcggtttcgatatatctacggaactgattattcgcgcttcgattctagtgtgccagccttcttgttgaaggaggtgtttgcgcttttgcgtgagcaactcgatctgacggagggtctcgagagcgtgtgggagctgatagtccgcgacttcatccatacgcgcatcgtggggccggatggtaacatccaccaaaagcaccgcggtatcccgagtggttcagcgtttacctctttggttggctcacttgtcaaccttgtcctgaccgagtacgtttggatcaggtctacgggtgaggagatgcccatgaacgccatccttgttatgggtgacgatgcactgtttggcagtgaccgatttgtctctccgcaggagatgaaaaggtacgctggcgaattggggttcactcttaatccgtcgaaaacgggggttacatcaggcgctggggtacggcacacgatggaggaatggccacatttcctgggatactattgggtaaacggtgtcccgaaccggcctgaggatgagatcgccatgagaatggcattgcctgagcaccatcggaaacaagatcaactcctcagcaaccaacgtaaagtcgggtatgcgatgacctgtaggcaaggatatcgcatggttctgcaactggcgggtgaagcgcgcgtgatgaaggcatgtactgaaatcatgcgcgccgctaagtccgacgagccggtcaaaccacaaaatctgcctggttcactcagacagagagtcgcagtagagggtgaagtcgtgagcttcgcggatgggaatccacttccaatcctgctcggacggatctactag

SEQ ID NO: 1375 - DNA, 1758 bp, Arabidopsis halleri partitivirus 1
  source 1..1758: mol_type = other DNA
atgaagaacaccgtcgttctcgaaccactgccatcgctggccaggcccatttatggagataccgacccaggtcgaaatccagcctaccagagtacagtagaccacgcactcaggcgactcctcacagctgaagagttcaacattgtcgtcaatggctaccgacgttccccttggaatgaagacgccctaaccgccgatattgaaaagctcaactctgactatcaccacgtcaataaagatgagcattactacaaagctattgaacatacaaagaaattgttcacaccaaaggagaaattaagacccgtgcattttaatgatctacgtcactacccatggcaattgtcaacgagtattggcgctccattcgcgacaagcgaaaagtggaaggattatattaatcagaagtatgacgggaaactgaagtctagagactttaaagacctattcaaagaaactcatggagtttcgcttgaaccatacatgatcgatagacgcttatcaaagcgtaacttctacaatgaaatgttctacattaatcgaattaatattcatcacattaaagatggatggacaacgaatccagcaggacacgatttacgttactggcatactgcacacgcaagacaacacttagttgaagccggagacgaagacaaagtccgactagtattcggtgcaccttctaccttactaatggccgagctcatgttcatttggccgatccagactagtttactagcacgtggatcttcttcgccaatgttatggggctacgaaaccactacagggggatggtcccggttatacaactgggcatattctgcccttcccagattcggagccgtcgctacccttgattggagtagattcgacaaagacgctcgacatactgtaatcacagacatacatgatttaatcatgcgcccaatgttcgacttcaattcaggctaccacccaactataatcaacccaagatctaatccagacccgcaaaggctggagaatctatggaattggatgaagaatgcaatcctaacgacccctctgctgctgccagatgggacgagactacaattccaacattctggaatttattcaggatactttcaaacacagatattagactcaatgtataattgcgtcatgatatttaccgttctttcaagaatgggattcgatttaaactcagttgctattaaagtacaaggagatgactcactcatcttactcagccacagctacactttcttgcaacattcgtttctgactacgtttgcacaccacgctgccgtatatttcggctcgacgctgaacgtaaagaaaagcgagcttttaccatcactagaagacgctgaagttttgagatacagaaatcatggtatgatgccatatcgtgaagaacttcaactactagcaatgctacgacacccagaaaggactgcctcactctcagccctcatggcacgaagcatcggaatagcatacgctaactgcggaaactacacccgtgtacaccacatctgcgaggatatccacaattacctaaaagggattggggttaagccagacgcatttggattaccaggtggattaaggtttcgaaagaactacctcccctcttatgaagaaatcgacatcagccacttcccaacatggctagagaccgtcgaacgcttactagacccctcaagacctctgcttaccaacaagcactggcctaccactcactttttcggtatccccggagagtcctag

SEQ ID NO: 1376 - DNA, 1497 bp, Asiatic toad partiti-like virus 1
  source 1..1497: mol_type = other DNA
ttttatttggttctacaaccacttcctacatgccgtgttttacgacaacattttatgtttgtatactattactactatcgttatttattattccatgtcaagaaagtcaatccattgcaatactcactttcagatatgtctactctacagcaagttgataaactgtgcccgtacgccctctcaaaggaaccacacccagttgaccagcctgccctcgctgcctttcaaaagctctaccccctcgctgttccagccgtcctggactattctcgaggcatgtacagccccgaactgcactactcttctctcatgcgctacgcccgacccttaagcgacgacgcccgcatccgagatcagctatcgaatgatcttactctggcctacgccctccagcatgcgaagaaccagctacgtgctgccttctctgttaccgccacctccgcctcccgcctcgatgacgttccattcattggaaagtccgttgccggctacggctacatcggctccaaagctgacaactacttgttagctcgatcccgggccactgccaacctcgcaaacttccgtaagtttggatctgcccttcggcacacaccatccctagctttcgctcgatgtcagctcgctcccatcagcgatccgaaagttcgccatgtctgggctactccctttcatcagatcctccttgaaggatgcattgctgcacctattctcgagagtctgactcgtcagccctccccttttgctatcggactcaatccatttaaggatctgccccatacgctctcttctctccttgaagttaccggttttgtcgcctgtattgactactcggccttcgattcctccatccacccatggtggtttcaacaattcttcgacttcattaaagaagcagtaacttttcctaacaattttacctcgctcttgccggactattgccttgatgcactatcccgcacgcccgtgctcatgcccgacggtagactttggttatgcacttctggcttgcccagcggctcatacttcacttccctcatcggaagcttcgtcaacctcgtcctctgtttctatcttcagttaaagatatttaagaaagttaccccgactaacgttctcggtgatgactctgtcttctactgccccacgctactcgatctaaatcaggctcaagctttactagcccccttcggattcacgattaacaccgctaaatctctggttactaactctttgcctgtcgtctcctatctcggccacaacatccgtggaagttcactctcccgccccgaatggaaagcactcctgctcgccatgttgccagaagaaacggttaccgacccatcggaatcacttctccgattgctgtccatcaatgttgactgcggttacacctccagcgctctgctccggatcattaaccaactcattgaagataaccccgacgtcagaatcccacccggattcggaaacccaccttactttgctcattccgtt

SEQ ID NO: 1377 - DNA, 1269 bp, Asiatic toad partiti-like virus 2
  source 1..1269: mol_type = other DNA
tctgtccctttacagatgactactgttacctacgtccgtcgccttcccagctttgccacacgaacaactgaagctaacgaggatcgcttcgtacgcgagataatagaacatcgtctgcccaacatcattactgagttacgctcctactcgcgtggactgtactcgctcgacctccactacgcttcgctttcaaagtacgaacgcgccctcgctgtcgaagacgatatacacgcacgccttctggataatccttgtctcgctacggccctctatcgagccgaacttgagcttgagtctgtattctctgtcaccgcaattcctgcaaatcaatttgattccgttgcatacgtcggatcctcctccgccggctacggctacgtaggtaacaaacgtgacaactaccttctcgctcgacgtcgcgccacgactaacctagcgaactatcgtcgacacggacccagcatgatgtttactccaatgaaagcttactcacgcactcaacttgctcttcgctcacacccgaagatcagacacgtgtggggagtcccctttcacactattctaatcgaaggccttaccgcccagcccattattgagaacatcttacgcaatccttgtgccatctacatcggcaaagacatgtttaagacgctccccttcgatgctcgagaattactaaaagatggcgaattcctaaactgccttgacatctctgcttttgatagctccgtcaaccagttcttcatcgaccacttcttcgactttgtcgaacgctgtgttacttaccctgatgaattcacccgcctctctctcgactacactcgcgctttctaccgccagcgccccatcctaatgcccgacggccgcctctaccactgctcaaccggcgtaccatctggctcctattttacacaactgttagattcatatgttaacctgattttaatgtactatgtacaactcaaattgtttaagaatacgatgaaaacttacgtcttaggtgacgattcacttttcgtgtctcccactcctgctactgcacaagactaccattcattgcttgccccactcggctttactctaaatattgagaaatctttaatcactaacgatctttccattgctatgttcctcggccacaattttcgaggcacccgtttaacacgttccgattttacacttgcttgtttagcattgtatactgaagaccccgttcactcaccagacgaatcgtttattcgtctacaatctttgttttacgactcagcg

SEQ ID NO: 1378 - DNA, 743 bp, Asiatic toad partiti-like virus 3
  source 1..743: mol_type = other DNA
ctcgcaattattattccatgtttagaaagtcatccaatgcaatactcactttcagatatgtccactctccagcaaatcgataaactgtgcccctacgccctcgccaaggacccgcaccctgtcgataaacctgctctcgctgctcttcaaaagctctacccctccgccgttccatcagtgatggaatactcaagaggtatgtacagccctgaactgcactacgcttcgctcatgcgctatgcccgccctcttgaggacgacatccgcatccgtgcccagctaacgaatgatctcaccctggccaccgccctcaatcacaccaaggaccagctccgtgctgccttctccgtccaagccatctccgcctcccgccttgacgacgttccatttattggaaagtctgttgccggttacggatacattggatccaaagcggataactattatctcgctcgccctagggccaccgccaacctcgccaactttcgtaagtttggatctcgcctccgccacactccatccctcgccttcgccagatgtcagctcgcgctcatcagtgaaccgaaagttcgccacgtttgggccaccccgttccatcagatcctcctcgaaggatgcatcgctgcacctattcttgagagcctgaccaagcagcccacaccgtttgctattggactgaatctatttaaagatctgccctatacgctctcgtcactcttcgaagtcaacggatttgccgcctg

SEQ ID NO: 1379 - DNA, 1716 bp, Aspergillus creber partitivirus 1
  source 1..1716: mol_type = other DNA
atgaacatttcgcacatacaaaacgtatatcaacgttcgctcgttctagagcggcgtatccgcttgagtgagctctttcctacgggattgattccttacctcaagaagttggaactctcaggtgtaatcgctacacctcagggacccagcgcgacgaaggcacccgcggtgaccacgtcgtttgaccgcaagtatcctctggaactgtactccaaggatgattacgttcttcgccctcaggcgtctatgacctacatcggtaagatggatggttataactttaatcaatcgattccaaagtttgatccttggtttcgttcgatcctgaaggagaagtctccttctatgtctcagtatatggaagaaaccttcatccgtgatccttgcaccccagaacgtgtcatgcaacacatgtcattgttcgatcgttggtggaaacgcaaacccaacgatattcttatgaagagagcagcagctttggtaaaagagctcttctcccctgttggaaaagttgatgttattgatttcaattatgctggttggcacgaaatacttccacatcttgacatgacttcttctccaggacttccgcttcgacgggagtacactacgcaaggtgagtgtcttggacatatctatgaaaagacaaagcgactcaaccattttgcgaagtttttaccaccaggtgctgtacgcgcaccaccatgcatgataggactccgtcctggcctcatccgacgcgatgaacttgatactaaagtcaaagcgagaggagtgtgggcttatcccgctgaagttaaagtaatagaagcaagatttgctgttcctttaatgaaacggttctccgaagtgtttggtaagactccttaccctactggtcgtaatatgacaaaagcattacctatgcttatcgaccatcttctcaacgatgggaagcacggtttggttactgatgtatcaaaacttgatacgtgtattggaccagactatatcaaatgggctttcgctctcatgaaggatatgttctttatgggtttcactgaaagttcagcgaaacggaacgagtgtgtctgggatttcctagaatattatcatactcgaactccggttctcttgccttctggtcaactgatcaggaaagcaggaggagtaccttctggctcgggtttcactcagttagttgatactttcgttaccgttctcatcacatgttacgggctgcttgaacaaggcatctctgagcacgagattaagggcaggatatttgttgttggtgatgacatggctacggctgttgattctaccttcgacatcgagaggttcaccagaattctctcaactcttggattcgagatcaaccctactaaggttatgttctcagatcgagctattgagctcaagtttcttggctattctaagctaggtggcggtgttttccgtccagatactgaactcatccaaacagcctactttccagaaaggtttgttggaaacgtcgatcgcgctagacagcgtatcttagggcaaacgatagcatccggtttatgtaacggatttctatctaaagtcaattactggatggctgaattgtgtaatcaggttcctactgatcctgacgaagtctacatccctcagaaaagatggatgactcacgtcttaggtctcgattctttaccttcatccgcaatagtatttgatctctttccactggtctaa

SEQ ID NO: 1380 - DNA, 1629 bp, Aspergillus flavus partitivirus 1
  source 1..1629: mol_type = other DNA
atgagtaaaccatctgaacccttcaccgcctttccatttgattatcctggtaagagcgaagttgctaaatttttggagtcaaatccttggacaaagccgtttcggcaccttacccatgtgggacatacaggtcagaaacgaggagtgttgcaaaacacccagcgatatgatccatttgtaaacgaagcacttcgacatttcgacaacgaccttaggaagtcactgaaaggtttcacaagaacacctggcgacgagacaaaacttagacaagctttagacaagtacgaccgtccttccctatcatttgataacatttttcatgggaacgacaagttacgcgcgtgctatgaacaagcttaccgcgaagttttcaatgaattcgctctcgaccgcaaagttgttccgaagtttcctaccgctgttgacttggtcatggattcatcctccgggtatccgcattttcaaaagaaaagtgaaatacgcgatcaaatactccacgagggtcgaacatggttacatcacgccaagagcaaggattttcaccgtttgccactgcttccatgcagcgtcggtgttagaggcgccctgtcacctgaggacgacccaaagacaagattagtgtggatgtaccctgctgctgttaccgttgcagaaggtgtatacgcccaaccactcattaaagctatctaccgcgagaaggcacatttgcttcttgtcggcgaggagactagatttcgactctcgaaatttctgtcactcatcaatgaagataagcatacatatggtgttggtttggacttctccgcatatgacacttttccatgctccgatctctcccgagatgctttcaagattatgaaacaaaacttagcttttggaagttattgggatcctgagaacggaacaatcaccgccggttctgacgatttgaggaactttgagcgtgtgcgttcccgagctgagcacggatacgacaatattatggaatacttcatccataccccgctgattctaccaaatggacgtgtagttagaaaacacactggcgtgccatctggatcacactttacaaatctggtcgattcgattgtcaatagattattacaaaagacatttggattgtatactggacgttcgcttcgtgaactacgaacgaacggcgatgactctgctttcatcgtcagcgatacatacgttaagaacattcttgaagatgcatccgaattcttcaaagtatggcgcatgacggtcaagcctgaaaagagtgtagttgccggtactcccggtgaaatgcacatttcagggacaacctgggaagcacttcgcccaacacgatcaaccaaggattggttgatgatggcattgtatccatcaacattcgtcaaagatgcaaacatggcattccaacgccttctcggcattggtatagccggcgcattctatgacgcaaagtactgtcaattctttcagtacttccaaactggatacgactgtcagcacggccccaacttactttcgtggaaacggctacgatggttggaaccggtcttcggcatcaacgacctcccgaagatttacaaacagaagagttctgtcacaaggataagaactcttctctgggctccttga

SEQ ID NO: 1381 - DNA, 1701 bp, Aspergillus flavus partitivirus 2
  source 1..1701: mol_type = other DNA
atgtctaacttgaaactcattggacgcttccctcagctagcttctccgatccacccaggtggcggaatacaaaacgctgttcttctttcactgaagagaaatgtaagtactgacacttacgataaaattgttaatggctatcgccgttcaactttctctcaggaagcactcattgatgactatctcaaaggagatgttcctaaacacaagatcatcaaagacgtcgtctactatcaggcacttgatcacgtatcacaacttttcaaaacgccgcaaaagtaccgacctgtatcttttccagatcttaggttctatccctggcctacttcaagctcagccgaagcacccttttcttcttcgaagaaattgcgctccgattttcagaagctttacgaactaggattagttcaatcaccgagactcacgttccacaatctttacaatcacatcttcaactacaaccgcgaaactattcaccgaatcaaactcggaatgaaaacagattatcacggacgagatgcccgatattggaacacagcacacgccagatcacatctggtcgaatcacatgaggatgacaaaatccgtatggtttttggcgtaccaaaacttttacttcaagcagaggctatgtttttgtggccgttaatcaaccatctagttaacctagacggtaatggaccaatgttgtgggggtttgaaactctcaaaggcggatgggcgaaactatataactggtttcacactcaacgacctaaagcaagaacctttcttgccttcgattggcgacaatttgataaacgtgcacaatttgaggttattgatgacatccatgatgtcctcaagtctaacatcgatttcgaacacggatatatgcctaccaaggactatcccgaaacatggactcaccctcaaaaactcgaaaacctttggaactggatgactaacgcaatcaaacacactcccgatctcttaccagacggaagaatgtatgaacgtcaacatgctggaatcgcttccggctttttccaaacacaactcttagattcaatctataatgcaataatgatttttgtttctctcattaaaatgggaatcaatatatctaccacaggattgaaagtacaaggagacgactcgatcgtttcactgaatgagtttattccaaagcaagtacaccagtcgtttatcgatcaatttgcaaatcacgcagatcgatattttggtgccgttcttaacactaagaaatccaaaatgggaaacactcttaatgggttacccgtcttaggttttactaatgacaacggttacccgactagagacaaagaagcattactcgcttcattactgtatcccgaacgcaacacagatcaaccacgcttgatggctcgagccattggtatagcatgggcgaactgcggtgttcacagtgatgtttacgaggtttgttccgacgtgtacaaacgatttcaagatgaaggattctctcctaagatgagcggacttcctgacatcgtgaagtctcaacatctactgttttctcgacctgcaaaggatgagaaaatcccggaggaatttccgacatttttcgaaaccattcgacatgttcaggagatcaatttccgatcacaatctcagaagcaactgttctggccaactgaagcccctggtcttacaaactggtttatttctgagtactaa

SEQ ID NO: 1382 - DNA, 1629 bp, Aspergillus fumigatus partitivirus 1
  source 1..1629: mol_type = other DNA
atggaagattatactcaagatccaacccagcactacgtcttagctaaggggtctcatttgattgacgcactccaactccgaccggcacgaagcggaaagagttcaaccactagctatgatgtgctaccttccaattttgagtcagacaccctccgtgaaatcgcgaggtatggtggctactctacatactcttcagcatccaacactgatccttgggtgcgtgagagtctaaagatatttgaccgtgatcagtacgaagcgatccgtggcttcactcggcgaccacaaggtacgcccggtatgtatgaatctcttaagaagttctctaccgaagagcgttctaccttctggtccctctctcctcaacaacgtacttcgatgcgccgtgctatcggtaaagcgaagcgtgctttcaaactcccctacaagcgtgaaccgcttgactggcatgaagttggccaattccttaggcgtgacacgtcagctggagccacctttatgggccagaagaagggtgatgtgatggagcaaatttaccatgaggcgagatggcttggccaccgcatgaagcaagatggtatcggaccgtttcagccccacaagatgaggttccctccctgtcttgcaggccagcgtgggggcatgtctgagagagatgatcctaaaacgcgcctggtgtggatttaccccgcagagatgttggttgtggagggtttctacgcccctcttatgtatcgtgactttatgaacgatccaaatacgccaatgttgaacgggaagagtgcacaacgcttgtataccgagtggacgtgtaacttgagggaaggggaaacactatatggtatcgacttttccgcttttgacgcgcgtgtaccggcctggcttatcaaggctgcgttcgcaattctgcgacagaacgtggatttttccacttttcgtggaaaacccgtgaataaacgtgatgctcagaagtggaggaatgtgtgggatgccatggtgtggtattttataaatacacccatacttatgccggatggacgtatgttcagaaaattccggggtgtaccttccggatcatggtggacgcagatgatctattccgttgtgaactatatcatgatcgagtatcttgcggactgccaacgcgtggagatccgaaacctgagggtactgggcgatgacagcgcattccgctcaggcgaccagttcgatctggacgttgcgaagggtgatgccgagccaactcaaatgctcgtgaacactgataagagtggtaagtctaaggatccagctgacttcaaactgttaggtaccacgtatcggtgtggtcgagtccatcgtccaacagacgaatggttcaagctcgcattgtacccggagagctcagtgtttagtctggggctctccttcactcgattgatcggcctgtggttggggggagcgatgcatgatgcaacgttctcacgatttatcgagttcttccaacaatgctatccatgtcccgaggaggggtggttctccaaagatcaaagacggtggctagagatagtgtattcaggcaaagcgccaagaggttggactaccaagaagagtctcttttggcgatcaatcttctacgcctatggctag

SEQ ID NO: 1383 - DNA, 1722 bp, Aspergillus fumigatus partitivirus 2
  source 1..1722: mol_type = other DNA
atgctattaaccgaaatccctaacgtttaccaacgggcggttgcccttgagcgccgtatccgacttagggaactgtaccctgaaggtgtcgtcccatatctcgctaaacaagagtatgatggtgcgatcgctggaccacacggtccacacggtagtgttgcaccgagtgtcactactacttttcaggctaaacttcctctcgatcagtatccagaccgtaaatacactttagaatgtaaagaaaccatgatctatttgggcaaaatggacggttatccattttcttcgtcaattcccaaatttgatccttggttccgcaaggttctaaaggataaagatccggccattgtgaaagatctagaggataccttcatgcgtgatccatgcacccctgatcgcgttatgaaacatatgtctttattcgataggacgtggaagcgaatgccgactggacgtttaatgtccagagcaaaggacatcgttgctaagatgttcgaacccatcggtaaagtcgagccaatcgactttaacttcgcaggttggcacaagatattgccaaacctagacatgacctcctccccaggtctacccctccgacgcgaatatcagacacaaggcgaatgtcttggtcacatttacgataagaccaagaggttaaaccatttcgccaaattccttcaccccgctgccgttcgtgctccgccttgtatgattggtgtccgcccaggactcatcagacgtgacgagtacaacgaaaaggtcaaagcgcgcggagtgtgggcgtatcctgctgaagtcaaggttatggaaatgcgtttcgttcaaccgcttattgaaaggatgtctctcaactttatgaagataccttatcctgtaggacgcaacatgaccaaagcacttccgatgctaattgatcacatgcttcatgacaagaagaaaggtttcgtcactgacgtttccaatctcgacgcaagcgtaggacctgactatattgattgggcctttagcttaatgaagacttggttcaattttggtatcactcaatcttctgaaaccaggaacgcaaatgtgtttgattttcttcactactactttaagaggactccgatcctcctcccatcaggacaactcgtcaagaaggcgggtggcgtgccctccggttcgggttttacccaacttgtggacaccttggttacaattctggcaacagtgtataccttgctgagaatgggctgggatgaagatcaaatcatcaaaggctacatgcaagtagtcggtgatgacatggctgtctccgttcctcgggactttgatcctgaagaattcgtttaccttatgggcagtcttggattcactattaatctcaagaaggtgatgttttccgacaaaggaatagagctcaagtttcttggctattccaagtatggaggaagcgtctaccgcccccttgatgaattgcttcaaaccgctttctttccagaaaagtttgttggcaatcctgaacgttcgcgaatgcgaatagctggtcaaactctagcttcaggaatgacgaacgctttctttagtaaagtcaattactggatggaagagcttgtttctctagccaccgaattggatcccgacgaagtgttcatacctcaacgccgctggctgcgtatcgtgcttggactcgatgaaatgcctagcactactctggcttttgacatgttcccgttagtctag

SEQ ID NO: 1384 - DNA, 1749 bp, Aspergillus lentulus partitivirus 1
  source 1..1749: mol_type = other DNA
atgagtcacaacattacagttcccagcacaatgctattaaccgaaatccctaacgtttaccaaagagccgttgctctcgagcgacgtatcagacttagggaactgtaccctgaaggcgtagttccgtacctagcacgtcaggaatacgcaggagcgattgcaaccccagttggtccctccgctagtcgagcaccgagtgttacgactacttttcaggcaaaacttcctcttgatcaatatcctaagcaagattacactcttgagtgtcaaaacaccatgatctacctcggtaaaatggatggttatccattctctcaatctatcccgaagtttgatccctggttccgacacgtacttaaagataaggcacccgagaaggtccgagatcttgaggatactttcatgcgtgatccgtgtacccctgatcgcgtaatgaagcacttatccctcttcgacagggagtggaagcgaatgccgactggtcgtttaatgaccagagcaaaggagatcgtcgcaaagatgttctccccccttggcaaagtcgagcctatcgacttcaactatgcaggatggcacgaaatccttccccatcttgacatgacctcctccccaggtcttcctctccgtcgagagtatctcacgcaaggtgaatgcctcggtcatatttatgataagaccaaacggctaaaccactttgcgaagttcctccatcccgctgctgttcgagcacccccttgtatgattggtgttcgcccaggacttatccgtaaagatgagttcgagacaaagattaaagcacgtggagtttgggcttacccagcagaggttaaagtcatggagatgcgctatgtcataccccttcttaacagaatgtctacgatgttcttgaagataccgtacccaatagggcggaatatgacgaaagcactacctatgatcattgacaacttgctacgcgatggcaagcacggttttgtaaccgatgtctctaaccttgacgctagtgtaggtcctgactggattgattgggcttttagcttgatcaagtccttttataatttcggaattacacaatcttccgaaaccaggaacgagaatgtcttcgactttttacactactactttaagaggactcccatcctcttaccatctggccaactcatcaagaaggcgggtggcgtaccctcaggttcgggttttacccaacttgtggataccatggtaacaattctggcaacagtgttcaccatgcttagaatgggttattccgagaatgatattcttgggaaaatctggacagtcggagatgacatggcaacttctgtacctgaagactttgatgtcgaaggttttgttaagttgatgagctacctaggcttcacaattaacttaaagaaggtcatgttttccaacaaaggcatcgagcttaaattcttgggttattccaagtatggcggcagtgtctttcgacctctggatgaactcctacaaggagctttctttcccgagaaatatgtcggcaatgcagaacgttcgcgaatgcgaatagctggacaaactttagctgcaggtatgaccgacgctttcttcagtaaggtaaattactggatggaagagcttgtttctttagccaccgatttgaatcccgatgagctatacattccacagaagcggtggatgaaaatggttcttggcttagatgaactaccacgaacaacgcttgcatttgacatgtttccgctagtctaa

SEQ ID NO: 1385 - DNA, 1722 bp, Aspergillus nidulans partitivirus 1
  source 1..1722: mol_type = other DNA
atgcaacaccaacttgaaactattcaaaacgtctaccaaagggcagaagcactgtcccggaggattcgtttacgggcgttatttccagaaggaatcgtcccgtacattaagcgccttgagtatgctggaactatcgccagccctacagggccgaaagcgaccgtggcaccgcctgtcacgcagtcgttcgacaagggttttcccctcgaaatgtatccgaagcaagattatgtgctttatccgaaagtatcgatgcgatatatcggtagaatggattcttacgccttcaactcgtcgatcccaaagttcgatccgtggttccgagaagtgctgaaagaaaaggccccccaagtatccaaagacctggaggacacatacatgcgagacccttgtactcccgagcgagttatcgctcacatccaactctttgatagagcttggaaacccatgccaactggtacgaccatgaaacgagctgatgctctcatgaagcgtcttttcaaatctgtaggtaacgtcgatcctatcgactttaactacgcagggtggcacgaaatcctaccctctctagagatgtcttcatcccccggtctacctcttcgtcgtgaatacgccacgcaaggagaatgtttaggtcacatctatgataaggcaaagagacttaaccatttcgcgaaattcctgaagcctcacgaagtgagagctcccccttgtatgatcggtttacgaccgggcttgatccgtcaagatgaactcgagacgaagatcaaagcccgtggtgtctgggcttatcccgctgaggttaaagtcattgagatgcggtatgtcataccacttctcaaaaggttttccgaatgtttcggtaaaataccttaccccatcggcaagaacatgacaaaggtattacctatgcttatcgatcaccttctaaacgacggaaagtttggtttggtcaccgatatctctaaacttgatacgtctgtaggtcctgactggatcgattgggctttcgagtttatggaagatttcttcttctggggtattaccaaatcatcggttattcgtaaccgtaatgtgtaccgtttcttacaatactatttcaaacgtacactcatccttcttccgtccggtgcattgtatcggaagtacggtggtgtcccatctggatctggtttcactcagatcgtagatactctcgtcaccttgaaactaacaatttacgctttgttagtgatgggctatgatgaagaggacattatcggcaaaatctttgtcgtcggcgatgatatggctacatctgtatcatctgacttcgatgttgcccacttccgcagaatcgtaggaatggcaggttttgaaatcaacgagaagaaagtgatgttttccaacaaaggcattgagctgaagttcttaggttattctaagtatggaggtggtgtctacagaccaatcgaggaactattgcaaactgcaatgtttccggagaaatatgttggaaatgcagaccgtgcacgcatgcgtgtaatgggacagactatagcatctggcctatgtaacggtttcttttcgaagtgcaattattggatggctgaacattgttcactgaagccacccgatccgcacgaggttttcatacctcaaaagagatggcttcgtaacgtcttaggactcgaagaaatccctcaaacgctggtggtgtttgacatttatcctttagtgtga

SEQ ID NO: 1386 - DNA, 1629 bp, Aspergillus niger partitivirus 1
  source 1..1629: mol_type = other DNA
atgagtaagacatctgaacccttcaccgcctttcaatttgactaccctggaaagagcgacgttgttgatcataagaagatcaacccatgggcaaagccgtttcggcatatgaccgttatcggtcacaagccgtacaaacgaggagtgttaacgaacactcaacggtacgacccttttgttaatgaagcgttgcgtcattttgacaatgattttcgtaagtcactgaaaggttacacacgagttcctggagatgaaaacaagctccgtgaatcgctcgataagtacgacaagccaacgaagacgtttgataacgttttctataaagatgacaagctacgcgcatcttatcaacaagcttatgctgagtgttttgacgagtttcgtttagattcgaaagttactccgaagtttcctaccgctgttgacttggtcatggactcctcatcaggataccctcattttgtacgaaaaagtgaaatgaaggatcaaatcttgcatgaaggtcggacatggttacatcacgccaagagcaaggattttcaccgactgccactgcttccatgcagcgttggtgttcgcggcgccctgtcaccagaggacgacccaaaaacaagattagtatggatgtaccctgctgctgttaccgttgcagagggcgtctatgcccaacccctaatcgaggcaatgtataaacagaaggcgaaatacttcctgaccggagtagaatcgcgttctcgtattactcgctacctcgcgctcatttctgaacagaaaggagagtatggagttggtcttgatttttcttcatttgactgctttcctgttgtcgatttgatctatgatgcattcaagatcctgaaacaaaatgtgaactttggttcatactgggatcctgaaaacggcgttgttactgccggcattgatgatcttagagactgggaacgcgttgccaagcgtgcagaacacgggtacgacaacttagttgagtactttgttcatacaccaattatcctgcctaatggtctcgtagtccgaaaacatcacggagtaccatcaggatcacatttcacgaatctcattgattcaattgttaatagattgcttcaaaagacattcgggatctacactgagcgttcgattcgtcatctcgcgacgaatggtgatgactcagcctttattgtctcctccacatatgcgacaaacattttagaagatgcggcacacttctacaagcgttggtggatgacatgcaaaccagagaaatgcgttaaagctggtacaccagcagacatgcatatatctgggacaaagtggctgtgttcacaaccgacacgaaccactgcggaatggttccaaatggcactgtatccgtcaactttcgttaaggatgctaacatggcattccaacgacttttgggaatcggcattgcaggcgcgttctacgatgctacctattgccaattctttacttatttccaaactggatacgattgccaacatggtccaaacctcttatcgtggaaaagactacgatggttagaacctgtttttggaatcgaagatcttcccaagatctacaaacagaagcgttctgttacaaagatcagaacgattctgtgggccccttag

SEQ ID NO: 1387 - DNA, 1620 bp, Aspergillus protuberus partitivirus 1
  source 1..1620: mol_type = other DNA
atggaagattttactcaagatccaacaacacactacgtcttagctaaggggtctcatttgattgacgcactccaccttcgtcccgccaaggacaggtcaaccactagcgaagatgtgcttccgcccggcttccaatctccggatttagcggagatagccaagtatggtgggtactcaacctactcgtctaactcgaacaccgatccttgggtcagagagacgttaaagttatattcacgtgaaatgtacgaggaaatctggggcttcactcgtcgtccgcaaggaactcctgggatgtacaagtctttagagaagttcgcaggcgagaagtgttccttttcgaagctttctggttctcagaaggcgtcgatgcgccgtgcactcggcaaggcgaagcgtgctttcaagttaccctacaagcgtgaaccgcttgattggcatgaagttggtcagttcctacgacgtgatacgtcagcagggtcaactttcatgggttacaagaaaggagacgtgatggaggagatctatcacgaagctcgttggttaggacaccgtatgaagcaagatggagaaggtactttcaatccatccaagatgaggttcccgccttgtcttgcaggtcagcgtgggggaatgtcagaacgtgacgaccctaaaacgcgactggtatggatctaccccgcagagatgttggttgtagagggtttctacgcccctcttatgtatcgtgactttatgaacgatcccaattcaccaatgttaaacgggaagagcgcaccccggttgtataccgaatggtgttgcaatatacgggacggtgaaacattgtatggaatggacttttcagcctttgatactaaggtgccagcgtggttagtctacgctgcgtttgacatacttaaacagaatgtcaatttcgcgacttttggtggcaaaccagtctcgaagttagaagcgcagaagtggaagaacgtctgggatggaatggtctggtactttgtgaatacacccatcctgatgcctgacggcaggatgtttcgaaagttcaggggtgtaccttccggatcatggtggacgcaaatgattgattcagtcgtgaattacgtactgatagagtatctagcggactgccaggcagtagagatccgaaacctgagggtactgggcgacgacagtgcgacacgagctaacgaccagtttgatctggagcgagccaagctcgattgtgaaccaacaggtatggtgttaaaaccagaaaagtgtgatcggacgaaggacccgacgcagttcaagctgctaggtactacgtaccgtaacggccatgctcataggcctacttccgaatggttcaagctagcgttgtatccagagtcgagtgtgctatcacttgacatgtcatttactaggctcattggcctgtggttaggtggcgccatgtgggataagatgttctgtggtttcatggacttctttcaaacaagttatccgtgtcctgaagaagggtggttttctaaggatcagaagcggtggcttgaggtcatctattcaggcaaagctccaagaggctggactaccaagaggagtctcttttggagatcaatcttctacgcctacggctag

SEQ ID NO: 1388 - DNA, 1610 bp, Atrato Partiti-like virus 1
  source 1..1610: mol_type = other DNA
atgaacaaagcacaaatgcaagagtttctcaagcctttgccaccaggtccaggcttcaaattcaattaccaaccgtctaggttggacagaaatgcattgtatgctatcaacagggtctttgatcctgctaaggtaggagaggttcgatcgaaatatcatcgggcgaaattaaatctcgacgatctacgtactgatctgctcgagtataaacgcacgaagtttcctcgcagtcacacagacgcatactatgccatctacgaaagtgtcgatagagacattttcggcgatgtaaaaattatacctcttacacacggtgctgtagccgcgtcagacaagataccaaagaataagtcgccaggattaccttacaaggtgcttggttacaattctaaggccgaggcattagccgaccctgacacactaccacgcatccgtaaactatggtacgccatagaaagaggtgaaccggtggagctgccggacgtagcttgctatgcgcgagctcaaatctgcagtagagataagaataagataagagcaacttggggttaccccctcgatgtctatcttacagaagcacaaatattttatccactgctagatcagcttaaaaaccgaccgcaaccaaagattgcctatggcatcgaaataggaacgggaggaatgcactatattaatgagatggctaagttctactctaaggcgaacttcttgattggcgactggtcacgatttgacaaaagcgtaccagcttggttgattagagacgcctttaaaatgatagctagacacgtagacttctcacaagtgcaatcagtatgtggctcgttatggcccgtcagagagtcaaaatctaggaagcgcttctccgctatggtcaagtacttcatagacaccccagtgcagttgagttcaggggaaagattcttgaaacacggcggagtgccatccggctcatgctggacaaacattatagacagcgtcgtcaactgtcttgttatgcggtacttaacgtatcagctaacaggtaaattgcctgtagacgacatttacctaggggatgactcatttctggttctcgatggacctattaacttagaagagttagcgaacctcgcgtataaagagttctcaatgactcttaacgtcgagaaaagctttcaaaccagtaatgtgacaaacatccattttctaggatattataatttatacggggtgccatttaaacccgtagatactgtcattgcttcgacactttacccggaacgaccagtaatgtcgaagtttgaaactattacacgcatgatcgggcaagcatattcgtgctttgaacctgaggatgctaagaagtttttccaagcttctaagatattgcaagacgaaattgagggattagagacttcaatgattgaagagttcactgaatctcacccacattggtttaaatacctacagactcttggcatatcgacacgtcgtggtctgaaaataccgacggccatgccatatgatatcatatggctaaccgcgcccatggcgcccagacgcacatggaaaccacagacacacgatttagtacatttagctagcgtagcttataagaattcact

SEQ ID NO: 1389 - DNA, 1449 bp, Atrato Partiti-like virus 2
  source 1..1449: mol_type = other DNA
ctgtccagtttgcatcggagtactattacttatgaatccatggtggaagatctttacgcatatgatagggagccagcgaggtgcgttagagatgacgtctactacgcagttcttaactctatccgcgaagattttcagtcctttcctaccatagtaccacttaccatgggtgcagtgccgcaaagacccgacttcccaggccagaagtctccgggtctaccttacaagctacaaggcttcagaactaagcaagatgttatagatgcaggtctacttcacgagataaacagagactggcagaacatcgggttcaagaagcgtcgggtagatttgccggatgtgtgtctgtttgcacgagcacaaattgcacgtgaaggacgggagaaaattcgtgccacgtggggatatcccatatcagtatatatcgaggagggacgatttttctacccgatacaggataccataaaagctaggaaacacgattttcctatagcttacggattcgagatggcgcatggagggatgcgtgttatcaatgagttgctcgggaggaatccaggcgcaaagtacctttgccttgactggaagcaattcgataagacggtacccccttgggtcatccgcgatgcattctctattctggctgagaagatagattggggccacgtcgaggacgttgaaggtaacatctggccagtggcacctgaaccttccaaacgtagatggaagcgtatggtcgattactttatcaacactccaattcgtacgtgtaagggtgagagattcttggtatcgaccggtgtaccgagcggatcttgttggactaatctcatagacagtatagttaacgcgctctatgtacggtatgctgtctatcaaacaacaggctcacttccgttggacgagatgtatctaggagatgacggtgttgtgatagcatcaggagtcataaatctgaaagacatggccgaagtttgctctgagaaattcggagcgattcttaacgttgataagagcttcgttactactcgcaaggaaaacgtacatttcctagggtattttaaccaggccggttatccgtttaagaatcaagatttcctgatcgcttctttcattcaacctgaacacacccgcaaggacgccctagatgcatgtgcagctggactcggtcagttgtggagtggttttgatccatgttatgcaaatacgtggaggaagattatcttagatgtagctgctaaggatgatctttcattgtgtcaagtcgttacccacttgaggtccaactcacatcgacataagtatttgatgcatgtgggacttgatgctagaaccctcacaattccagcgccaaacgaggatggcttaatccttgacgtcctaccctcactgtttttaggtaaaatacctagacgtcgtcgctacaacttggcgacgttattcaattaa

SEQ ID NO: 1390 - DNA, 1419 bp, Atrato Partiti-like virus 3
  source 1..1419: mol_type = other DNA
atgtattacgtcaaccgtgttagaggatttgggatgcgccccaacaacccagaaccctccccatatgcactcgctctgttcggaaaagaaggcgcgctttctgctcgtcgatcggaattaaggtttaagttaatcaagaatgatatgctaaagatgggatcaaacagtaccgtcattaaggatgatttgtttggatatgttgtcagagctgcaagggataagtttaaggtgaattcagtcaatccgattcacttgaacgacattttcggaatggacctcgaaatccggaaatccagtcccggcctaccatggcagcctgaatacaagacgcgaggggaagttatggactgtccagccgcccagaacaagatcaggtggttttggcaccgcatcaaggcagatgaacatttaacgcccgacgattgcaaagttctataccgcgcacatatccaacgagatgaaccgaagatccgagcagtgtatggctatccgaccgctatcacattgatggaagcatgtttcgctgttccattaatcaatgagtacaagctgggaacgacaccaatcgcctacaaatacgacatggccgttggcggagcatggaagcttcgctctcgtataaagcagtatcaacatttcggatgtgttgatttctcaggctttgacaaaacagtgtcggctcaattgataaagatagcgtttgccatactcgaacagaacctcgacctacgacggtatcagggacgtggagtaccagattcaagacgactataccgagcatgggactacatcatcaagtatttcgtggagacccccctgcgattgtgtaacggtgagcgatggaagaagaaagcgggtatacccagtggatcctactttacccagcttattggatcaatcatcaattggattctcatcaattacgcctacttgcgacggtatggcaggttcgccgacgagtgtttcgttttcggcgatgattccgttatctcaagccactcacccttcagcttggaggctctgagtcacgagcttgggctccttgggatgattgtgaacgttgagaagtccatttacacatcgagcgtcgacgaggtggagtttctcggattcaagatagaaggtggttttccctgtcgtaacctggatcgttggatggaagcgctataccatccagaatggcccgaccaggattgggacatgtttgcgagtcgagctttaggattgttttacgctaattgtggagttcacggagagttcgctcagatttgccgcaacatcgtcgggatgcgcagtttcacagtacgtctgcctcgtgatactgagcgcatgttgcgacatttaggagtccagattgcagactgttctccgatacttccgcttcctgaagttctggtgcaccgtctgatgtgcatgtga

SEQ ID NO: 1391 - DNA, 1367 bp, Atrato Partiti-like virus 4
  source 1..1367: mol_type = other DNA
atgattaaactttcgagttttaaagggttcgcacagcgacacacccgtgcagagaaaactccgtacctaggattcctaaatgacgttccggaatacctgcgcagcgagattagcttggatggaattcgacgagacttgttccagtatcataactctgccaaacgtccgacagatccagtgttttggaaagctgttgccgcctccgcccgccgtttcaggatgcagccggttcaccctagacatctgaatgatattattaacgacaatactctcgacatatggtcttcctcaccgtgtttaccctggtcacagtatggatataagtctaagaaagacgtgattaatgatccagcctgtgttcgctctatacgtacattttggagtaggattaaacaaggataccatattacggcacccgattccatggcccacgttcgttcacacctcataaaacgtggtgaacccaacaagctacgagctgtctggggctatccattaacgatggttctcggtgaagctatgtttgcactaccactgattgcagcatgtaagaaagttactccaattgcgtatggatacgagactgctgttggtggcatgcggaaaatagtacatgaatccgctcactgcaaatattttagcgcattagacttcaaaagctttgataaaactgtacccctctggcttatagatatagcttttgatgtgctagagtccaatcttgatttgacacgttatcaagactatggtgtgccagacaccactgcattgtaccgttgctgggattacataaaatcatactttaaatacactacgatacgtcttgcaaatggtgaacgatacaagaagatcgtcggtgtacccagtggaagttactttacccaattgatcgacacaatagtaaacgcaatactgttggagtatgcttttatgaagcagggtattgagatagactacgtcaagatacttggtgatgatagcattataggtagtatgatgaaattagacctagatgacgcccaagatctactctcccaacttggtatgacaatcaatgctgccaagtctggccaatcacgttacatatccgagctggaattcttaggctatcaaatatgcagcggatatcctattcgtccatatcagaaatggcttgctagccttgcttatccagaattcccagataaaacgcttgatgattttatgtcacgtgcacttggtttaggttacgctaatgcttccggtgatgacagatttgataaactggtccgttttatcctctcctggaagtataagtttaagataaccttcggccgtaattttgatcgatggttacggtctcaggggattgagcacatggacgtagc

SEQ ID NO: 1392 - DNA, 1557 bp, Atrato Partiti-like virus 5
  source 1..1557: mol_type = other DNA
ctgcctcccgcacataaaggattttcttatgacatgtccctaccctacgttgatttcaaagcagttcgagcgtgttacgctgctgggtgtggagatacgtgcgataaagttctatttcactctcgaagatcgagagtcacaactgaatatctttttgacaacgttttgaattatggctatgagacaccacctcgcttaaaggacgacatttacgctagatgtctggatgaactgagagctgagttcaaagtaacagaaactattacaccactttcgttgaaagaagcgtctcaacaaataccccagagtacaagtcctggcttaccatggataaccatgatgccttcagctaaaaagggcgaagtgttagaaaaacactttgataagatagcgaaggactgggagtatattgaaaatggacatcgaaagtaccctttacctgattgcgctgcatttggccgttcgcatattagcggaaaagatgtgaataaagtgagagctgtctgggttgtacccctaactgttatagctgctgaagcaagatttgctctgcccatcacagatttgcttaagaagcaagagattggtattcacactgcgtacggctgcgaaatgatgaaaggagggatgagttggatacaccaacaatcgctgcgcgcaaaattagttgatccaggtactaagtttctgatgacggactattccagctttgactcacgagtgcccgcgtggctgatccgagactgtttcgcaatactgagggagaaatttaaattaacgcaagccgaacaagaagtatggagacgcatagtatcatattttataaatacacctatacaattcgctgataagcgtagattgttaacaaaccacggcgtaccctccggcagcatgtggactaatgttattgatacaatggttaacttcttgcaaacacgctacttagtatatggcttaatgcgcacaaatccaatttatgatatatattttggtgatgacggcttaattgcgttaccctcctgggcattaataaatttaaatgatatagccaaggctgcccgcgaaaagtttggagcaatcataagcccacagaagagttattggacgaatatcctacctaatattcactttttaggatactacaataataacggagcaccattcaaaagcattgaaagcttaatagcctcatttctatatccacaacatgtccaagatgattggagttatacgttagcacgagcgttaggcattttatttgcttctgctggcgataagaccattttcaaactatgccaaactgtttatcacatggctagacaaaaagatgaatgtactgtaacaaaagcgttttcgctagttaacacccatccccgtatgttacggcattttataaatatgggaacagatgttacaagtatgtcacctgaactttttaaagatgtaagactgatcgtgccaatagatacgtgcacaaaatgggaaaaaggtgtgttccttgttgatccagacccaaagttgagttactccttggctgtgaacacaagaagagagtga

SEQ ID NO: 1393 - DNA, 1638 bp, Atrato Partiti-like virus 6
  source 1..1638: mol_type = other DNA
ttgatagttgtttgctctcttggattagcactccgtttgagtatgattacatttgctcctattacaaataccctttcctgccgacatatcgaagcttctttcgatgagtgggcctcggaacttagaacattgggcgtaggcgttaccagacgtgctacatccggaataggctttcgtgcgcgacaagcgcagactgccgagtcagtacgactcacatctaaagaatccgaatcattaaaggggttttggcgctcaccagtctatagagatgtcgtttacgacactttaaagatgtcgtttgagccaaagaattcttccgttcatcctgatttcgcagtagcgtacaggcgtgcactaggctacgttgctaagtggttttcatccatggatcaactcaaaccagttgcagttaggaaggcttcggagcaattaccgacgacgacaagtccaggcttaccttatactaagtttggtcttcgttcgaagacggaagctagaccctatgcgctcactatccatcgtaaacttgttcgcaagctctgcatgggtcaggaagttcatatgcctcctgctttcatcgcgtcgcgttcccaaatcactgaagtatctaaacataaggctcgtccagtttgggtcattccatacaatcagcttctttttgaaggtatatttactgtacctctatttgagcagattaagaaagatcctttctttggttggtcatatgattggctatcaggtggtgctcgccgtttttctttgatgtacagagataacctcagtactctcttcgggacggatttttcaaaattcgatcaaactataccggcatttttgattcgtgatacactgagtgtgattaaatcgcacttcgttttggatcataaagaagagcttatttggaattcaatgcaggagtatcttgtgaatacgccttgcgtcttcttctcgaagttggcgcggagtaatggctcaatgccatcaggttcagcatggactcaaatccttgagtgcattatggatttggtgatattttcaactattactattcaaaggctagatccatattatacccctcgaactctggaacaaatcttgagacggtcaacgtttcttggtgatgattcagtcttcgatttgcatccttattatcagcctgttcttggtaaaacaagaaaacagactttttgtgaggacatttcaacttcattcggattaactgtcaatttggagaaaacttgggcttactgtgaacatggtaagattcaatttcttggcaaaatctggaatggttgttccttcctacatccaaccgatgcgggaattcgtgctctcgtttaccctgagtatgaagatcaatcccctagtgatttaatgtcacgttgtattggcgtcgcttacgccgcatgtgacaatcaggagttgtatgctatatgtgaacgtaactttagtttctatcagagacaaggttatgaaccatcgccttttaaggtggactatcgtaggtttttcgcccacgagatgtttatggacataccaacacttgaatttcccacattttctaggattcaggctttaatcaacaaagagctaagtgcaatcgatattagcagaatcaatgcacggcggtcaatctga

SEQ ID NO: 1394 - DNA, 1632 bp, Bactrocera dorsalis partiti-like virus 1
  source 1..1632: mol_type = other DNA
atgaacaaagaagaaacgacttcagagtttttcaaacgattaactcctggatctggcttcgcattcaattatcagccatcaaggctagataggaatgccttattcgcgataaatcgcgtattcgacaaagataaggtgtcaaatgttcgaatgaaatatcatagagcacgactcaatatcgtcgatttacgaaacgatttgcaagaatatgctgcagtcaaaaatcctcgaacacacacggacgcttattatatggtattggaatccatcgagagagacctctttcccgataaagatttcaaaataataccttggacccatggttcagtaatagagttcgaagacttgccaagaaataaatcgcccggtattcctttgaaacaacaaggatacaataccaaaggtgatgctttgcaagatcctgatatttgcaagaatatcagaaaacaatggtatgcaatagaatctggtaggtcagtagaccttcctgatgtcgcatgctatgctagagcacaaatttgttctcgtgacaagaacaaagtgcgagcaacatggggttttcccctaactgtctttctcacagaggcgcaatacttttatccatttatagaatatatcaagaactcaaaatcgaggctcttggcatatggtatagaaatgggaaatggaggtatgcaatatctaaatgagatgacgaaaagctatactcacccaaatattatcataggagattggtcaaagtttgataaaacggtaccagcctggctaatacgggatgcttttaaaatattagagaaacacatctgctgggataaggtgttgacgcggaaaagtcaagagacttggcctgtcaaagaattttgttcaaaagctagatggaaaagattaattaaatatttcatagacacaccaattcaattaagtaatggagaaagatggattaaacacggtggagtaccttcgggatcatgctttactaatttgatcgactctattgttaatggaatagtgatgagatatctaatatatcaacaaacgggacaattaccactaagtgattgtttcttaggtgatgactcagtctgtttgactgaaaaacccatcaacctagatagcctatcggagttggcctttatcgaattttcgatgaagttcaatcctgataaaagttatcaaacaggaaacgtggaaaacatgcattttctgggatactataatttattcggtcaaccgtataaacctatagataccgtaattgcatcctcgttatatcctgaaagaccagttcaagacaagtttgaaacaattactcgattcatcgggcaagcgtattcatgctttgaaccggaagacgcaaagagatttttctcatgcgcaagaatcttagctgaagaatgcaatcagctagaggattctgaaattgaaaattttattcaaactcacccataccaatttaagtatttacatactttaggtataaaggtagagcaaggagtaaaatttccaaaatttaagcaatgggattttgtatcaattacactacccagagcttgtaaaaagaaattttcacgtcgccacttcaatatagaagagttatcacaatatattgaaaaatggaaaaccgacgaatag

SEQ ID NO: 1395 - DNA, 1629 bp, Bactrocera dorsalis partiti-like virus 2
  source 1..1629: mol_type = other DNA
atggcgtttataaaattggacattacgactgattcaagcggagagagtctctacaggatccgcaaccctgtatactcatctcgtcccacaatagatccctctcctggaataccggacaggaatctattaccaaaaggaaaaggcttctcgtttaacatggatccacctttttgcgattttaaagtactacgagctatgtgcgcagctggctttaaaagtgaggctgagcgtattttatattcaacacgacgctcttacataactcctgaggcaatatggaatggactaacgaactataccaatccatcagccaggcgcctagatgatgcggtttaccaacaagtacttagggaggctaggtcccagtttttcactcccttaaccccaattagcatagaagaagcctctggattaataccgcagtcaactagtcccggactgccgtatttacatacacatccaggaatgaagaaaggtgaagtactggccacagaactgccgcggatcaaacgatactgggaatctgtaggacgtggagaatataccctaccaccacatgattgtgccgcttttgcgcgtagtcatattggcccggcagacacgaataaagttagaccagtatgggcgtttccattagatgtagtgtgtgcggaggctaaatttgcccatccgtatacgaacgccctaaaagaacaaaccatagggaggaacaccgcctatggtatggaaatgatgtgcggaggaatgacctggttggataatcaacttaaacacgcgcggttgattgacccaggctgcaaattccttatgaccgattattcacaatttgacagcacagttcccgcttggttaatccgagattgtttctccataatatgggaatgttttaaaggtcattgcactcgtgaagactattacgtcttcaagaagttaacatcttattttatcaacactacaattcgcaacccggacggacgccggttgcgcaagctacatggagtgccttctggtagcatgttcactaatataatagacacaattgtaaatttcatagtaacgcgttacataataaagaaaatttgccagtccgatgtaatgactgatgtttattttggagacgacgctattgtagtacttaggtcgtctactttaattaatattgatttgctgtctcaagccgccgattactattttggaatgaaaattaatacaaagaaaagctactggactaataatataaataatgtgcactttttaggatattataatgcacacggcgacgctttcaaaccatcagctgaactctttgcctcactactatacccacaatattgggttgatgattggaaatatactttggcacgaacaatgggaactttaatggcagctggaggtaataatactgacgtttttatagtcagccaaatgatatatttactggccactagcaggaacaccgcttttgatgacgcccagaatttaattttaaataacccacgcatgagaaggcactttagtacaatgggagtccagcccgaagaaataaattgtactatgtttctatcacaacaaaatagcataccgttactaaaatgtactaaaataataaaagatataaaaataatataa

SEQ ID NO: 1396 - DNA, 1629 bp, Bactrocera dorsalis partiti-like virus 2 isolate Bf
  source 1..1629: mol_type = other DNA
atggcgtttataaaattggacattacaactgattcaactggagagagtttgtataagatacgaaatcccgtctactcctcccgtccaaaaatagatccttctcctggaataccggaaaagcatctattaccaaagggaaaaggcttctcttttaatatggacccacctttttgtgattttaaagtactacgagcaatgtgcaacgccggatttaaaagtgaggcagaacgtattatatattcaacgcgacgttcttatattactcctgaggcgatatggtgtggattaacaaattatacagctcccaccacccggcgtttggatgatgctacataccatcaagtattaagagaggcaagatcccagtttttaacccctctcaaaccgatatcacttagagaagccgctggattaataccgcagtccactagtcccggactcccgtatttacatacacatccaggcatgaagaaaggtgaagtactggccaccgaactaccaagaataaaaaggtactgggatgcagttggcagtggctcgttcaccctgccaccgcatgattgtgctgctttcgcgcgcagccacataggttcggcagataccaacaaagttaggccagtatgggcgtacccgttagacgtagtgtgtgcggaggctcgttttgcccatccgtatacggacgccctgaaagaacaaaccatagggaggaacaccgcctatggcatggaaatgatgtgcggaggaatgacctggttagataaccaactaagacacgcgcgattaatagatccaggctgcaaattcctaatgactgactattcccaatttgatagcaccgtccccgcctggttaattcgcgattgtttcgcgataatatgggaatgttttaaaggtcattgcacaagagaagattattatatcttcaaaaaattagtatcatattttatcaacactacaatccgtaatccagatggacgcagattacgcaagctacacggcgtaccatccggtagcatgtttacaaatattattgacacaatggtaaattttatagtaacacgatatataataaaaacgatatgccagtctgatgttatgactgatgtttattttggagatgatgctattgtagtactacgctcatccacgttaattaatatagatttgctatcacaagccgccgcctactattttggaatgaaaataaatacaaagaaaagttactggactaataatataaacaatgtacactttttagggtactataattcacacggcgatgcttttaaaccttcagctgaactatttgcctcactactttacccacagtattgggttgatgattggaaatacacacttgcacggacgatggggaccttgatggcagctggaggtaataatactgacgttttcatagtcagtcaaatgatatttttattggcagcaagcagaaatactgtttttgaagatgcccaaaaactgattgtaaataatccgcgaatgcgaagacattttagtaccatgggagtccagcccgaagaaattaactgttctatgtttatgtctcaacagaacagcataccattactgaaatgtacgaaaataattaagaatataaaaataatataa

SEQ ID NO: 1397 - DNA, 1629 bp, Bactrocera dorsalis partiti-like virus 2 isolate Bl
  source 1..1629: mol_type = other DNA
atggcgtttataaaattggacattacgactgattcaagcggagagagtctctacaggatccgcaaccctgtatactcatctcgtcccacaatagatatctctcctggaataccggacagaaatctattgccaaaaggaaaaggcttctcgtttaacatggatccacctttttgcgattttaaagtactacgagctatgtgcgctgctggttttaaaagtgaggctgagcgtattttatactcaacacgacgctcttatataactcctgaggcaatatggaatggattaacaaattataccaatccaacagccatgcgcctagatgatgcggtttaccaacaagtacttagggaggctaggtcccagtttttcactcccttaaccccaattagcatagaagaagcctctggattgataccgcagtcgactagtcccggactgccgtatctgcatacacatccaggaatgaagaaaggtgaagtactggctacagaactgccgcggatcaaacgatactgggaatccgtaggacgtggagaatataccctaccaccacatgattgtgccgcttttgcgcgtagccatattggcccggcagacacaaacaaagttagaccagtatgggcgtttccgttagatgtagtgtgtgcggaggccaaatttgcccatccgtatacgaacgccctaaaagaacaaaccatagggaggaacaccgcctatggtatggaaatgatgtgcggaggaatgacctggttagataatcaacttaaacacgcgcggttgattgacccaggctgtaaattccttatgaccgattattcacaatttgacagtacagttcccgcttggttaatccgagattgtttctccataatatgggagtgtttcaaaggtcattgcactcgtgaagactactacgtcttcaagaaattaacatcttattttatcaacactacaattcgcaatccggatggacgccggttgcgcaagctacatggagtgccttctggtagcatgttcactaatataatagatacaattgtaaattttatagtaacgcgttatataataaagaaaatttgtcagtctgatgtgatggctgacgtctactttggagatgacgctattgtagtacttaggtcgtctactttaattaatattgatttactgtctcaagccgccgattactattttggaatgaaaattaatacaaagaaaagttactggactaataatataaataatgtgcattttctaggatattataatgcacacggcgatgctttcaaaccctcagctgaactttttgcctcactactatacccacagtattgggtcgatgattggaaatatactttggcacgaacaatgggaactttaatggcagctggaggtaataatactgacgtttttatagtcagccaaatgatatatttactggccactagcaggaataccgcttttgatgacgcccagaatttaattttaaataatccgcgtatgaggaggcactttagtacaatgggagtccagcccgaggaaataaattgtactatgtttatgtcacaacaaaatagcataccgttactaaaatgcactaaaataataaaagatataagaataatataa

SEQ ID NO: 1398 - DNA, 1503 bp, Bania partiti-like virus
  source 1..1503: mol_type = other DNA
atgttacaatactacatgggtggtgtatgcacaatgctaactagtgttaagatggagtcagtgtttgacaaggagacgtgtgcacgtttacagcaacatctcaacagaagatctggagggattgagttgtttagattgcgtcgcctagtagaactggttgcagctcagcaaggtaaggaaattcacctaccagagaaggcgtaccgaagctgttatcgacctgagatgctggatgagcccttgaagaaattcttggctgagaaaaggttcactcccgatcataagcggttgactgtagcggtcagcagggtcagaaagaagctcaagaagatgggtcatgtagatccgatttcagttgaagatagctatcagctgttgttaagcagtaagggtgagaagagcgccggcttacctacaatgggtaagaagcgggaagacaccggagcacttagtcgtgccgaggcttgtctgaagggaaagtgtcccccgccggttgtgttcgcacatcgcggcaagaacacagaagtcgctagaatcgttcaaatgtttccgattgaatggcatatcattgagggagtttacttctttcctttgcaagagaagtttaaacgaaacgtatcggtatatgcggcggagaacgcggtgaatcggcgtgcgattttcaatgagatagtcgcgagtggagagtattcctctaagcttgctatggactactcgggttttgatggaactatcggaagtcaattgattggtattgctttcggcttgttgcatgaacatctaaagctagatgataaactagagaaactatggagtagggtagctacctattttgcaacctgtccttttgtggaccagtatggcaatgtggtctcagggcggaagggcggagtccctagtggatcgatgttcactcagatggtggatacgttggtaaatgctatagtcgttgagtatatcttcgttgacgagcagaggacgcggtattacgtatatggggatgacagcctcatcttcctgaagggtactgtagaagaggtttcgtcgaagttggaaacgtataaaagtgaggccgagaagcttggcattatcgtcaacctcaagaagacgcacgtatgtgctcctagcgagcctaccattttcctgggccactatgatttacatagcggtcgccccgtggatgacgtcctgactagactcatctatccggaacgagccttcaaggtagacgctacacatcttgctacacgtgtcgcagcctacatggcagagagtgatgaagtgatgggtattttattgcctgtttaccgaatcatcaaagacatcggtgattctgaagccagggccgacattccgagctatgctcatcgtggaactgaaggcctcacgactatagagcttggtcgagtatatccatacatgctcacgggcttggcgcagttcctggctaatgaagatccggcattgacaaacagcttctggaggatgagatcttcagtataa

SEQ ID NO: 1399 - DNA, 1431 bp, Baringo Partiti-like virus
  source 1..1431: mol_type = other DNA
atggttacagtcttacctcgtaaagatggatttgctcaacgacatagtgagtccacatggatgagttcttacctgcaagtcttcggatttccattcgatttagaccttgcccgcagccccgttactttaaaatcaattcgtgatgatatttttaaatttcgatcaatttcaaaagttcaacctaagtgtccctatcttgaacttgctattgcgaaagcctttagacaatttaaaatacctctagttgagatgatccatttaaatgatgtattcaaacaagatttaaatatttggacttcatctcctggtttgccatggaaagatattggctataaaactaaaggtgatattcgtaaagatccagatgctatcaataaaatcagatggttctggcatagaattaaacatgatcaatatcttcacgctcctgatagttgcgcttttatgcgtagtcaccttgccaagaaaggagaaactaaagtacgagctgtctggggttatccagctacaataacatttggagaagcagtgtttgccgtaccattaattaaagcatatcaaaagtatggtacatccccaattgcatatggctatgaaaccgcaatcggtggtacaaagaaattatttgatcaagcagttaattatccaaaccatgttgcgcttgattttaaatcttttgataaaacagttccctcatggttaatccgaatcgcctttgacgtactcagatataatatcgatttctcaaaataccaagagtacggagtggctgatgtacacagaatgtggaaaatgtgggattatattattgattattttattaatactcccatacgtttatgtaatggtgaacgttaccgtaaacattctggtgttgccagcggcagttatttcacccagcttatagattcggttgtcaattacattcttatagagtggatggctttaagacaatcattgaagatcttatattgtagagttcttggtgacgactctataatgagtttgaataagccatttgatattgacagtgccgctgaattggctgaatccattggaatgataattaatgttgcaaagtcggcgtcttctcgccatatacataacttatcgttcctaggttttagaataaataatggtagaccgaccaaagatacttttgattggttagctgctctcgcctttcctgaatataaagatagaagctgggatgatttggcttcgagagcactaggtctgctttatgcatgttctggcaccgataaattctttgatagattgtgtagagatataatatcttttaaaccatttgaattgaatttcggtcgctcagtatcaagattcttgagcatgcttggatttaagcctcagtcacttaccactgatctgccttctccaatgcagtttgcacgaagattaggagtttactaa

SEQ ID NO: 1400 - DNA, 1620 bp, Beauveria bassiana partitivirus 1
  source 1..1620: mol_type = other DNA
atggaattcactcaggatccaacccaacacgacgtattcacagaggggtctcatttagttgacgcactccacctccggcctggaaaccagaggtcaaccatcagtgaagaagtcattccaccatcctttaacgcatttggtctgcgtgagattgctaagtacggtggatactcaacttactcatcagcatctaacacggatccctacgtccgtgagaccttaaaaacttactctcgaagcacctatgagagggttcgtggctacacgaggcgcccccaaggcaccccgggtatgtacaagtcactgttaaagttcagtgatgatgaacctaatcaattccatcgcctgacgcgtgttcaacgccgggctatgttctctgctattaagaaggctcgccaagccttcaagcttccgtggaaacgtgaacctcttgattggcaccaggttggtcaatatctgcggcgtgatacgtcagcagggtctaccttcatgggctccaagaaaggtgatgtgatggaggaaatctatcatgaggctagatggctgggacacagaatgaaacaagatggaaggggccagttcaatccatcccggatgaggtttcccccttgtctggcgggtcaacgtggagggatgtccgaacgagaggatcccaaaacccgtttagtatggatctaccccgctgaaatgttggtagttgaaggcttttacgcgccgagaatgtatcacgactacatgaaagattctcactcaccgatgttgaacgggaagagttcgcaacgcttgtataccgagtggacttgtggacttagggaaggtgaaacactttatggaatcgatttttcgtctttcgatacaaaagtgcctgcgtggctaattcgcgtggctttcgatatactgcggcaaaacatcaactgggatacgttccaaggtgagcaggtttcgaagcgtgaacgacagaagtggcgtaacgtttgggactccatggtgtggtacttcattaacactccgatactcatgccagatggccgcatgtttagaaagtatcgaggtgtgccttccggaagctggtttacccagatgatcgactctgtggtcaattatatattggtcgattatcttgctggttgccaggaagtcgaaatccggaatctcaaagtcttgggggatgacagcgcgtttcgcgccgacgacagtttcagcctagctgtcgccgaaagggattcgagtgccgtgggaatggttatgcatccggataagtgtgagaaaacactgaatccgtccgagtttaagttacttggcaccgtttacatcgacggccacccacatcgtgagagcgatgagtggtggaaactcgccctgtaccctgagtcaactgtgccatcagttgaagtctcgcttacgagattggttggcctgtggattggaggcgccatgtgggacagagatttctgcaactacatggactacttccagacgtgctatccgtgtcctgaagaggggtggttttctaaggaccagcgcagatggttggagattgtcttctcaggcaaagcgccacgaggatggactaacaagaggagtctattctggcgttccatattttatactttcggttaa

SEQ ID NO: 1401 - DNA, 1620 bp, Beauveria bassiana partitivirus 2
  source 1..1620: mol_type = other DNA
atggaagattatactcaagacccttctacacactacgtcctagctaaggggtctcatttaattgactcactccacctccgtcctgccaagacggggtcaaccactagcgaagatgttatcccttccaatttttcaaatccattcttgaccgaaattgcaaagtatggtgggtacgctacgtactcgtctaactcgaataccgatccttgggttcgagagacattaaaacacttctccagagaaatctacgaggatatccgtggttacactcgccgtccacagggaacgccaggcatgtacagtgctctgttaaagttcgctggtgagcgtaactcattccactcgctttcaccgtggcagcagaaatgcatgcgtaattcgattgctaaggcaaagaaagcgttcaagcttccttactcgagagaaccccttgattggcacgacattggccagtttctgcggcgtgatacgtctgcagggtcaactttcatgggctcgaagaaaggcgacgtgatggaggaaatctatcatgaagcaaggtggcttggccatagaatgaaacaggatgagaagaaaccctttaatccaaccagaatgcggtttcccccgtgtctggcaggtcagcgtggcggcatgtcggagcttgatgagccgaaaacgcgacttgtgtggatttaccctgccgagatgttggttgtggagggacagtacgcccctcttatgtatcgggactatatgaacgatccaaattcaccaatgttgaacgggaagagctcacagcgtctgtacaccgaatggtgctgtggcttgcgggaaggagaaactttgtacggactcgactttagttcgtttgacaccaaagttccagcgtggatcatttatgctgcattcgatattgtgaagcaaaatgtcaacttcgagacattcgatgggaagcccgtgtcaccggctgaccgtcagaagtggaaaaacgtctgggatgggatggtgtggtactttgtgaatactccaattttgatgcctgacggacgtatgttccgtaagctcaggggtgtaccttccggatcttggtggacgcagattattgattccgtcgtcaattacataatcaatcagtatcttgcggactgccagcgtgttgagatccgaaacctgaaggttctcggtgatgatagtgcattccgagcgggggaccagtttgatctggagctagcacaaaccgactgtgatgtgatgggaatggtcctgaagcctgaaaagtgtgataagagtaaggatccaagtgacttcaagttgttgggggtgaaatatcgaaatggtcacgtccatcgtccgacggaggaatggtttaagttagtgttgtaccctgagtctagtgtgtttacgctagatatttctttcactcgcctcattggcctgtggttaggtggcgcaatgtgggatcgcatcttctgtgagtttatggactattatcagagttgttatccatgccctgaggaggggtggttctccaaagagcagaaacgttggctagaagtcatctattcaggaaaggcgccacggggctggactacgaaaaggagtcttttctggcgctcaatcttctatgcctatgggtaa

SEQ ID NO: 1402 - DNA, 1755 bp, Beauveria bassiana partitivirus 3
  source 1..1755: mol_type = other DNA
atgttgggcaacaaaactttcaagaacattggcgcgctacgtcaactcaagcgtgtttcaaagttctcctccaaaccatccacgtacaacgacccgtacgcttacgacgctgtcgcctcggtctccggacctagaggacgcgccttattggaatcggtttctcaagattggcaccggccctccggggatgtgcaacttttggaagaaggcatcatgaagtactctgaaccttcgcgcaagcgatgtgtcgacggagattacctcgccattctgaagaagactcttgacgaactccgaccagcagagcgtatcgtcccgctcaccctcggtgctgctgctaagcatcccgacttcccccgcactacctcacccggcttcccctgggttactcaaggttacgcgacgaagggtgacgttcttgccgacaaagtcgcctccgggcgatgccaccgcgcatgggatacaatcggtcgaggtgcaaattggtctctcccggattcaatggcttttcacagagtcgttgcgtctgaacgggagaaggtcaaggtccgacccgtctggggctacccaacggaggtcgtgcttgaagaggctcggtatttcctacccctcatcgcacaccttaagtcgcactctgattcaaccgatggattctatggtcttggaatggaaactgcaaagtctggccaccgccatctcgctcgaaatttcgagatcgagggcgtacagtattcgatgtctggagatttctccaacttcgatgcgagggtgccttcttggctcattcgcgatatattttcatatatctctgattggttcgacttttccaaggttcgcgatagtgacggtaaatactggaacgtcaacgtttcacagacatgccgtcgatggaaagctatggtctcttacttcgtctcgacgaaagtgaggacaccttctggcctccgggttcagaagtctcatggtgtaccatccggttcgatgtggactaatgttatcgatacgatcgccggcgctgtgcagatgcgcaccgccctttaccgcacccaaggctacctgcctcacaaggattattactatggtgatgattcgcaggtcttccttgatgagtgccccgatctggaggctctcgcctccgtactcgatgatgttttcggcgccatcctttctcctacgaaaacgattttaaccaccaatccagataatatacattggcttggttactatcatcgtgacaccggtcccgagcgagatcttcgatttattctcgcttctaccatcttcccagagcgtgaggttcactcaccgctcgaatcagctgctcgcctcctcggtcagctctactcatgtatgcatcctgtgcacgccgtagttttctacgatgccgttcagcacatcttggataaatacaacttgacccgaggccttttggacgagtacgtatctcagctccctgcaaaggcaatgaagttcctagttacagtaggacttgacattgatgagatcaccactcctcctgtcgaatgttcggcttttggtggacggtttatatcttccgttcttcccaagccctcagcgagaacattcgttcgaacaagacaccgcgtgctgcctgaatacgctttcgccgctgaagcctactccaatagagctcttcgcactccgaatttctttcatgatttttctctttttaaacaaactttcgatgtgccctacgatgagttcctcgatgactccggttactttacggattga

SEQ ID NO: 1403 - DNA, 1539 bp, Benes partiti-like virus
  source 1..1539: mol_type = other DNA
ttggaagcaataaaggatttgagctcattcgttatccaaccctttcgtaggaagtttcttaaagcgtactgtgatcgtatgtcgaaagataatcttaattgcttgtgggatgataacgttgctagtgtcttagaagagcaagggttctcaattttggaagcgcctcgctccgtttatcgggttgagaaactctatcaggcactagccaagtatgcgcccaaaagttcgcctaaaatcgacatggatgatcgagacgttaaagttggcgttagcctcgcgtatgcttgttttgcgaagccgaaggaagacccttgtttggagttaagtgatctcaccccagatttcatttataagataacttcaaaccataaagggtcggcgggcctaactgcttggggtcagacaaaagcagaaagctatgtacatgcctatgagtgtgcacttcgacagatttccggtgagaagagaccagacccgtgtgttgcatttaaaagaacccagtttaacgataagactcggctcgtgtggggttatccctacgctatgacagcacttgaaggtctattcgcacgtcctttaattgaaaggcttaaacagggcgacacgcctatggctttcggcatgtcaacaggtgtgttaggctcgaagctcagagtggccgggcgtcacaaagagtgggcatactcgacagatgttagttcgtttgactcatcgattgggcaacaactaattaagtgtgcatttaatattctgtcaacgtggttcaatttgaatgagatagaaaccacaagcggtcaaagttataagataatttggaagatgatcgttaattatttcattcatacaccaattgttatgcctgatggtaacatctataaaggtaaacaacatggtgttccttctggctcatactttacacaaatcattgatagcgtagtcaatgtgatacttgtgggtgcaatatcttcacgatttagtcttcatgtggacaaaagtgatatctttgttcttggagatgacatactgttttggtcaaataggaatgtgaatttggagcatgttgcaaagtatgccagcagcgtattcgctatgacgttcaatgctgagaagtcgtcaaagtatcggtataatgagcagattcattatcttggtagggattggatgaatggagttccaactcttgccgattccgaaattcttaagagaatggtgcaacctgaaacctttagaaagtatgatgacgataaagtcaagagagagcgtcaggtcaggatgttaatcctatcctacgtagccgtttatcgtaatgcgtatcacatttatcttaaatgtatggattggcctaggcggtactgctgtacgaacgcggatattgaaaattgggtatatactacgggggtgacccgccgacgagataggtcgtatcgtccaaatgctgattacatgagtggtcttgcaagatatttgcataagtatgtattaaatgagcatgggtcactggggacatttactccaattgcgctacagttttggaagtag

SEQ ID NO: 1404 - DNA, 1791 bp, Bipolaris maydis partitivirus 1
  source 1..1791: mol_type = other DNA
atgttaaacaacctcgtcctcggcatcaaacgcggcctagcgaaagctatacgtggcaacgctcaagacaatcatgtcattgaagcttaccatcacgttgtgcttcacgcgctcaaccgcttcttgccccagcacgaagtctatgaaatagttcatggatatcgtcgatcagtattcgatgaaaacgcgctcaaccgagacattcagaaactcaactctgaagatcatcccgtccctaaagacgaacattattggaatgcaattcgcaaagtccaacagatcttcactcctgatgtcctactacagccggttcatttcgctgacctcagacactatccctggaaactatcaactagcatcggcgctccctttgccacaagcaaagaatggaatgcatatgttgttgacaaatttcatggctacgaaaacggtttcgatgaaagtacttttctaaagcactatcaccgtgacttatttgctgaagctcactctggcatatcactggatcctccaatgattgacgcccgaatgtctaaacgtaatctctacaacgagatgtttttcatcaaccgcaagcatatacacatcatcaaagatggacgcaaaactaatgacagtggacacgatctacgttattggcataccgcattcgcacgacaacacctcgtcaaacaagacgaccctgacaaagtacgattggtatttggcgcaccatcaactagcctaatggcagaactgatgttcatttggcccatccaagcttggcttctttctcttaaggaacgttcaccaatgctttggccctttgtaacactaactggtggctggcatcgtctagtcaactgttttcagaaattctgtcccaattttgggttagtagcttctgtcgactggagcggcttcgaccgctacgcacgacactccgttatcagagacatccactctaatatcatgcgacctatgttcgatttctcaaaaggctatcacccaacacgtgactatcctgagactcaagacacagatcctgatagactggaaaatctttggaattggatgtgcgactcagtcctcacgactcctcttatgcttcctgacggaactctaattcgctttcaacactctggaatcttctccggatatttccaaactcagcttttagattctatctacaacctagttatgttattcaccattttctcaaaaatgggattcgaccttgacaatatatacgctaaagtgcaaggtgatgactccatcatctgcatagtttgctcattcttaatggtttcacattggttcattacaatgttaaaacattatgcaaactattactttggtgctatcgttaacgacaaaaagactgaagtgtccgatactctcgaacacgtcgaagtcttacgttaccgtaaccgtggtggcatcccctaccgcgaacgaatcgagctactcgctcagctctatcatcccgaaagagctataacataccaggctttaatggccagatccgttggcattgcttatgccaattgtggttctgacccacgtgtttaccagatatgtgaaaacattcaccaatacttaagtaaactgggagtaaagcctgaccccgctggtctaccatctggcgtacgttttgtacaggattatcttcctggacaaactgcgatagatgtacagcgcttcccctcttacttcgagactgtatctcgtctcctcgatggatacgaagaacagccctctgaaagttattggccccgttctcactttatcggtattcccggtagaacttga

SEQ ID NO: 1405 - DNA, 2028 bp, Bipolaris maydis partitivirus 2
  source 1..2028: mol_type = other DNA
atgtctactctcctccccacgcaagacgaccttctcgaagaagttcttgatgacttacaccctacaagtgtacttcatacacacttcgacccagaagatgaactcgaaaatgaagtcctccgtcccaacgaaaagttcgaattttacggacaacgtacggacccacttcccgacaatcgtgtaccgaaatctggtatacaatgcttggcacatctgaagtatcacaatacttccagagaccaccaatacgctgatcaacctgcatcaggtcctccacctatgcgcggtgtatcacgaattattagggattcttttccccaatacacggactacctccgtgaatggtgccgtcccaaaagttatgatgaagccattttaaatgactttaattatgaacagcgcccaacgcaaccattgtctgcagcacgcaaaagacagctcttacctttgattgaccatttcatggcaattaaaccatatgacattgttcactattgtgacacaaggttctatcccgctgatctctcacgcaaagctgactactttcacaacttctcacgcgcccgcaaaaatcacgcagcgaaatcacaccctgattacgccaacggcccaacaaagaagtcatggttcataaacgcacatttgtttcacgacagagcaacagtacacaacattaaactgttcgccctaccctttcgcccctaccctgacgaaaagcgaaacaacactttactccaactttggtttcagaaaatacccactgaactattagtcagatctcacatctcacatcctgacaagttgaaagtgcgcccagtctacaacgcacctatgatctacctccgtatcgaaatgatgctattctaccctttattggcacaagccagaaagaaagaatgctgcattatgtatggattagagaccatccgaggcggcatgtcgctcattgagcaactagcttccgctatgaaatcatttttaatgattgattggtctaggttcgatcaccttgcccccttccccctgatagactttctttttgaagattggctacccaccaaaatcaacgttgactctggttacgcgaaaattcgcaactaccaagatcatgttcattcatttaaggcacaagcccagaaattgaatgcatggctcgaaagcaacattgacgaaacacatccagatattggagttttcgctcacaaggtttccaacctcatttccttcttacaaagatggtacaaagaaatgatctttatcaccccagacggattcgcataccgtcgacaattcgcaggtgtcccctccgggatacttatgactcagtttttcgattcattcgttaatctgaccatcctcttagatggtttgattgagtttggattcaaagatgacgaaattaaggatttcgtactcctcattatgggagacgacaacgtcgctctcactaatgtgagtgctctcaagatccttgaatttctagaatggtttacagactattcattgattagatttggaatgaaaatcaacattgacaaatcaagttcaacttccatcagacgaaaaatcgaagtcttaggctaccaaaatcactatggtatgccctcgcgatccatttcaaagttagtaggtcaactcgcataccctgaacgtcacgtcaccgacgtagacatgtgtatgagagcaattggcttcgcttacactgcatgtggaaaggataccacctttcattcattctgcagaaaagtatttcactactactacgcgaaagtcaacattcccattgaccaactatttgaaactggaaagttcggtttacccggcacattctttgcttacaaagatattgctagccacattaaacttgatcacttcccatcaatcgatgaagtccgcgaactagtttctagtcaccaaggtttcttaacagaagagcctctttggaactacaactatttccttcatcccccagccccgaatagatcggattcactgaccctctacgaatatagagcgtcccagaagtaa

SEQ ID NO: 1406 - DNA, 1179 bp, Black raspberry cryptic virus
  source 1..1179: mol_type = other DNA
atggcgttgcaactagtcaacgatcatgacttcatagactttcaagcagaccttgaaattcttcctgagaatcatgctcagactattaggcgggagcctaacacggtttatcatgacgatttcgcgctacgcgaacttaagtctgcatatccgttactatatgaacaataccttgaaggatggtcaagaagcttttacacaaaagaagaccatatgaaggcaatcatgcagtattcatatccaaacataccaatcgaagcggtaaatgagaacttgtataatcaagcgatcaatgccactttagaaaggttacgtagccttccaacagtgagggcaatcgacgtgttaactgatttagactcagtatcattcgaaccgacatcatcggcaggttacggctacaacggcgtgaaaggcgacagtttaggagaaatccacaaacaagccattcgacgagcgaaagcaacgttatggtcagcaattcgtacagaagacgaaggaatagatcacgttatcaggacatttgtgcctgacgtcggttacacccgaacacaactaacccagcatagggaaaagaccaaagtacgaggagtatggggcagatgcttccattatatcctacttgagggcacagcagcacaaccgctacttgatgcattcaaagcaggaacaacattcctacacattggacaagatcctaagcaaagtgtacccaatttactatctagtatcagcaatcattgcaaatggttaatggcattagactggagctcatttgacgcaacagtaagtagatttgaaatccacgcggcgttcgacatcttaaagcaatttgtacagtttccaaatgtagaaacagaacaagcattcgaaatatcaagacaattgtttattcacaagaagatagcggcaccagacggcaagatttactggtcacacaagggcataccttccggtagttactatacatccattattggctcagtggtcaatcatttacgtatagaatacatcttcagaactgtaacaggtaacggaccaaaagtttgttatacgcaaggagacgactcaatcataggattagattcctacattgatcctagcttactcagcgaagcggcacaaccgctcggatgggtactgaacccagcgaagacagaaacggaggccgtgggaatg

SEQ ID NO: 1407 - DNA, 242 bp, Blacklegged tick associated partitivirus
  source 1..242: mol_type = other DNA
aacgaggtcaaggatgtcgagacttcattgtctcgtctcgtcggtttatggataggcggtggaacgaggtcaaggatgtcgagacttcattgtctcgtctcgtcggtttatggataggcggtggaatgtgggatacccacttctcctccttcatgcacttctttcagagtagctacccctgtccgtcggaaggctggtttaccaaagaccagcgccgatggttggaagtcgtgcacggggta

SEQ ID NO: 1408 - DNA, 1719 bp, Botryosphaeria dothidea partitivirus 1
  source 1..1719: mol_type = other DNA
atgcttttaactgaaatcccaaacgtttaccagagagctctggctctcgagcggcgcatccgcgtccgtgagctgtttcctgaaggtcttgttccttatctcaaacgacaagaacatgccggcagtatcgcctcaccgatcggcccgtcgcgttcggttgccccgaaggttaccgacaaattcattgcgaaagcgccgttagaagattaccctgacaagcgctacacgctcgaatgtaccagcacgatgcagtacattggccaaatggatgcatatccattccattcctcaatcccggaatttgatccatggttccgccatgtgctcaaagcccgtgccccagatgtctccctccatctggaacaaacctacactcgagacccctgcacacccgaccgcgtcatgagtttcttaaaactctttgaccgtacttggaaaaggaaaccaactggacgactcatgtcacaagctgagtctattgtcaagaagatgttcaaatgcgttggacaagtcaaccccattgactttaactacgctggatggcacgaaatccttcctcatctcgacatgtcctcatcacccggtttacctctccgtcgtgagtatgcaacacaaggcgaatgcctcggtcatatctatgacaagagcaaacgtctcaaccacttcgcaaaattcctacaccccgctgctgttcgggcccccccttgcatgatcggtctccgtcctggcctcttgaagaaagatgagctagatgagaagatcaaggctcgtggagtctgggcttacccagcagaagtcaaggttattgagatgcgttacgtcattcccctcctcgaacgcttcaaatctcaattcgggaagattccgtaccctgtcggagtcaatcttaccaaggctctccctttcatcatcgatcacttgttgaatgatggaaagcacggttttgtcaccgatgtgtcgaagttagacacgtccgttggtcctgactggatcgactgggcgttctcctttcttaaggacttctactacatgggcatgacagaatcaagcgagacgcgcaattcccacgtcttcgacttcttgcactactacttcaagcgcactcctattctcttcccttctggacaactcgttcggaagtcgggaggtgtcccctccggatctggtttcacccagatagtcgatacgctttgtacactcttgatgacgacctactctatgcttagaatgggttaccaagaggatgacattatcggaaaaatctttgctgttggcgacgacatggctacctccgtcccttctagcttcgatgttgagcagttctccttttacgtaggacaactcggcttcgaaatcaatgttgataaggtaatgttctcaaaccgcggtattgagctcaaattcttgggctactcaaaatacggtggtaatatctggcgtcctattgacgagttgcttcaaacagcgtacttccctgagaagtatgttggcaacccggaacgctctcgacaacgtatactcggtcaaaccctggcctcaggtctaacaaacggcttcctctccaaagttaactattggatggaggagctttgctcttggcacacagagctagacactgacgaagtgtacatcccacaaaagcgatggatgcgcaacgtcctcggactggacgaaatccccaggtccgccctgttgttcgacattttcccattatgttga

SEQ ID NO: 1409 - DNA, 1719 bp, Botryosphaeria dothidea partitivirus 1-like
  source 1..1719: mol_type = other DNA
atgcttttaactgaaatcccaaacgtttaccagagagctctggctctcgagcggcgcatccgcgtccgtgagctgtttcctgaaggtcttgttccttatcttaaacgacaagaacatgccggcagtatcgcctcaccgatcggcccgtcgcgttcggttgccccgaaggttaccgacaaattcattgcgaaagcgccgttagaagattaccctgacaagcgctacacgctcgaatgtaccagcacgatgcagtacattggccaaatggatgcatatccattccattcctcaatcccgaaatttgatccatggttccgccatgtgctcaaagcccgtgccccggatgtctccctccatctggaacaaacctacactcgagacccttgcacacccgaccgcgtcatgagtttcttaaaactctttgaccgtacttggaaaaggaaaccaactggacgactcatgtcacaagctgagtctattgtcaagaagatgttcaaatgcgttggacaagtcaaccccattgacttcaactacgctggatggcacgaaatccttcctcatctcgacatgtcctcatctcccggtttacctctccgtcgtgagtatgcaacacaaggcgaatgcctcggtcatatctatgacaagagcaaacgtctcaaccacttcgcaaaattcttacaccccgctgctgttcgcgcccccccttgcatgatcggtctccgccctggcctcttgaagaaagatgagctagatgagaagatcaaggctcgtggagtctgggcttacccagcagaagtcaaggttattgagatgcgttacgtcattcccctcctcgaacgcttcaaatctcaattcgggaagattccgtaccctgtcggagtcaatcttaccaaggctctccctttcatcatcgatcacttgttgaatgatggaaagcacggttttgtcaccgatgtgtcgaagttagacacgtccgttggtcctgattggatcgactgggcgttctcctttcttaaggacttctactacatgggcatgacagaatcaagcgagacgcgcaattcccacgtcttcgacttcttgcactactacttcaagcgcactcctattctcttcccttctggacaactcgttcggaagtcgggaggtgtcccctccggatctggtttcacccagatagtcgatacgctttgtacactcttgatgacgacctactctatgcttagaatgggttaccaagaggatgacattatcggaaagatctttgctgttggcgacgacatggctacttccgtcccttccagcttcgatgttgagcagttctccttctatgtaggacaactcggcttcgagatcaatgttgataaggtaatgttctcaaaccgcggtattgagctcaaattcttgggctattcaaaatacggtggtaacatctggcgtcctatcgacgagctgcttcaaacagcgtacttccctgagaagtatgttggcaacccggaacgctctcgacaacgtatactcggtcaaaccctggcctcaggtctaacaaacggcttcctctccaaagttaactattggatggaggagctttgctcttggcacacagagctagacactgacgaagtgtacatcccacaaaagcgatggatgcgcaacgtcctcggactggacgaaatcccaaggtccgccctgttgttcgacattttcccactatgttga

SEQ ID NO: 1410 - DNA, 1751 bp, Botryosphaeria dothidea partitivirus 2
  source 1..1751: mol_type = other DNA
cgcaaaactctcaagttttaccgtgttacgggttttccgcctccttcattacatagacctttcatggaagagttgctctatgttcctccttctttagacaacgttgtagaggagtctctttcgctagacgactccaccttgactccgtccaaccggacgagaggtgccagctacgatgtgatcccccccaacttccaaagtgccaatctccgtgagatcgcgagatatggtggatacggcgtgtattccgggcagtccaacactgatgcctgggtgagaacgtcattaaaagaattcgaccgcagtgtttacgaccaaatttatggatacactagacgtccagaagggacgatcggtatgtataaaagtctgttaaaattctcagacgccaagaacgagtttcattcgctaaaccgtgaccaacggcgcgcgatgcaaaaatcgatcggtaaagcaaagaaagctttcaaactcccgtggaaacaggagcctcttgattggcatgatgtgggtcaattcctgcgccgtgacacggctgcgggtgccacttggatgggtgccaagaaaggagatgtgatggaggaaatctatcacaaagctagatggcttggacatcgtatgaaacaggatggtaaaggtcaggtcaacccctcgaagataaggttccctccttgtcttgcaggccagagaggcgctatgtcagatgcgtccgagcccaaaactcggctggtgtgggtataccccagtgaaatgttggttgtggaagggcagtacgccccgaggatgtaccatgctttcatggatgatccgaatacgccaatgttgaacgggaagtcagcgcaaaaactttacactgagtggtgcgttggattaagggaaggcgaaatgttgtacgggcttgatttttcgagctttgacaccaaggtaccagcgtggttaattcgcgtggcgttcaacatcctccgtcaaaacatcgactgggaaacctggcacggtgagacggtgaacaaacgcgatcgtcaaaagtggcgaaacgtctgggatgctatggtgtggtacttcataaacaccccgatgctgatgcctgacggacgtatgttccgtaagtatcggggagtcccctccgggtcatggtggactcaaatggttgattcggttgtgaactacatccttgtcaactacctaacggagtgccaagccactgaaactcgtggcctccgtgttctgggtgatgactctgcctttcgttcgtgcgatccgtttggcctggatcaagcagaaagggacgcggcttcaatagggatggttcttcatcctgagaagtgtgatgtgactgatgatccatcaaagtttaagttgctcggtactacgtatcgagacggccacgctcaccgtgatacggaagagtggttcaaacttgcgttatatcccgaatcttcggtctcatcaaccggagcgtcattttcaaggctagtagggctgtggcttggtggagctatgtggaatttacatttctgcaagttcatggaatactatcagtcgtgttttcagtgtcctgaggaaggctggtttacaaaggaccaacgacgatggctacaagtagtataccaaggcaaagccccgcgtggctggacgactaagcgaagtctgttctggcgctcaatcttctacacctacgggtaggagtgcaatctcaatttatgagtggtaaacgttccgtgaccaacggatacgtgatacaataaatctcc

SEQ ID NO: 1411 - DNA, 1620 bp, Botryosphaeria dothidea partitivirus 3
  source 1..1620: mol_type = other DNA
atggaagagttgctctatgttcctccctctttagacaacgttgtagaggagtctctttcgctagacgactccaccttaactccgtccaatcggacgagaggtgccagctacgatgtgatcccccccaacttccaaagtgccaatctccgtgagatcgcgagatatggtggatacggcgtgtattccgggcagtccaacactgatgcctgggtgagaacgtcattaaaagaattcgaccgcagtgtttacgaccaaatttatggatacactagacgtccggaagggacgatcggtatgtataaaagtctgttgaaattctcagacgccaaaaacgagtttcattcgctaaaccgtgaccaacggcgcgcgatgcaaaaatcgatcagtaaagcaaagaaggctttcaagctcccgtggaaacaggagcccctggattggcatgatgtaggtcaattcctgcgccgtgatacggctgcgggtgctacgtggatgggtgccaagaaaggagaagtgatggaggaaatctatcacaaagctagatggcttggacatcgtatgaaacaagatggtaaaggtcaggtcaacccctcgaagataaggttccctccttgtcttgcaggccagagaggcgctatgtcagatgcgtccgagcccaaaactcggctggtgtgggtataccccagtgaaatgttggttgtggaagggcagtacgctccgaggatgtaccatgctttcatggatgatccgaatacaccaatgttgaacgggaagtcagcgcaaaaactttacactgagtggtgcgttggattaagggaaggcgaaatgttgtacgggcttgatttttcgagctttgacaccaaagtaccggcgtggttaattcgcgtggcgttcaacatcctccgtcagaacatcgactgggaaacctggcacggtgagacggtgaacaaacgcgatcgccaaaagtggcgaaacgtctgggacgctatggtgtggtacttcatcaacactccgatgctgatgcctgacggacgtatgttccgtaagtatcggggagtcccctctgggtcatggtggactcaaatggttgactcggttgtgaactacatcctggttaactacctaacggagtgccaagccactgaaactcgtggcctccgtgttctgggtgatgactctgcctttcgttcgtgcgatccgtttggcctggatcaagcagaaagggacgcggcttcaatagggatggttctccatcctgagaagtgtgatgtgactgatgatccatcaaagtttaagttgctcggtactacgtatcgagacggccacgctcaccgtgatacggaagagtggttcaaacttgcgttatatcctgaatcttcggtctcatcaaccggagtgtcattttcaaggctagtagggctgtggcttggtggagctatgtggaatttacatttctgcaagttcatggaatactatcagtcgtgttttcagtgtcctgaggaaggctggtttacaaaggaccaacgacgatggttacaagtagtgtaccaaggcaaagccccgcgtggctggacgactaagcgaagtctgttctggcgctcaatcttctacacctatgggtag

SEQ ID NO: 1412 - DNA, 1620 bp, Botryosphaeria dothidea partitivirus 3-1
  source 1..1620: mol_type = other DNA
atggaagagttgctctatgttcctccttctttagacaacgttgtagaggagtctctttcgctagacgactccaccttaactccgtccaatcggacgagaggtgccagctacgatgtgatcccccccaacttccaaagtgccaatctccgtgagatcgcgagatatggtggatacggcgtgtattccgggcagtccaacactgatgcctgggtgagaacgtcattaaaagaattcgaccgcagtgtttacgaccaaatttatggatacactagacgtccggaagggacgatcggtatgtataaaagtctgttgaaattctcagacgccaaaaacgagtttcattcgctaaaccgtgaccaacggcgcgcgatgcaaaaatcgatcagtaaagcaaagaaggctttcaagctcccgtggaaacaggagcccctggattggcatgatgtaggtcaattcctgcgccgtgatacggctgcgggtgctacgtggatgggtgccaagaaaggagaagtgatggaggaaatctatcacaaagctagatggcttggacatcgtatgaaacaagatggtaaaggtcaggtcaacccctcgaagataaggttccctccttgtcttgcaggccagagaggcgctatgtcagatgcgtccgagcccaaaactcggctggtgtgggtataccccagtgaaatgttggttgtggaagggcagtacgctccgaggatgtaccatgctttcatggatgatccgaatacaccaatgttgaacgggaagtcagcgcaaaaactttacactgagtggtgcgttggattaagggaaggcgaaatgttgtacgggcttgatttttcgagctttgacaccaaagtaccggcgtggttaattcgcgtggcgttcaacatcctccgtcagaacatcgactgggaaacctggcacggtgagacggtgaacaaacgcgatcgccaaaagtggcgaaacgtctgggacgctatggtgtggtacttcatcaacactccgatgctgatgcctgacggacgtatgttccgtaagtatcggggagtcccctctgggtcatggtggactcaaatggttgactcggttgtgaactacatcctggttaactacctaacggagtgccaagccactgaaactcgtggcctccgtgttctgggtgatgactctgcctttcgttcgtgcgatccgtttggcctggatcaagcagaaagggacgcggcttcaatagggatggttctccatcctgagaagtgtgatgtgactgatgatccatcaaagtttaagttgctcggtactacgtatcgagacggccacgctcaccgtgatacggaagagtggttcaaacttgcgttatatcctgaatcttcggtctcatcaaccggagtgtcattttcaaggctagtagggctgtggcttggtggagctatgtggaatttacatttctgcaagttcatggaatactatcagtcgtgttttcagtgtcctgaggaaggctggtttacaaaggaccaacgacgatggttacaagtagtgtaccaaggcaaagccccgcgtggctggacgactaagcgaagtctgttctggcgctcaatcttctacacctatgggtag

SEQ ID NO: 1413 - DNA, 1563 bp, Botryosphaeria dothidea partitivirus 4
  source 1..1563: mol_type = other DNA
atgaccagcagcaatcatgacgatgataactttggcaaagacaattccgcactgtgggacatgccttttcggtacatcacagaagcttccaggttgcctggatacaagcgaggaatcttacgccaaacgcagaactacgatcctttcgtagatactgcactgaaacagttcgatcccgagttacgcgagggaatcaaaggttacacacgatcacctggtgatgcgtgggacttgtcagagcgttttcgccgctatgacgtcgccaccctaatccatcccactggtgattcctacttcactgcatgttaccgccaagcagtagaagagacaacccgtgacttcaagctctccgcccccgtcgttcctcactggattctcgatgttgacctagtcaaatcgacttcttctggttaccctcatttcaaacgcaaaggggatatcttcgaccaaattcgacaagaaggacgtttccacctacatcacctcaagctctacgatcttcaccgatgcccactcctgccatgtactatggctacacgtggttcactttctgaagtgacagatcccaagactcggcttgtgtggatgtaccccgccgctatgactgcctgtgaagcagtgtttgctcagcctctcatcgacaaaatgtactctgagaaagcacatctcttcctcacaggtgttgacaccaaattccgcatccaacgctacctatctctgatctccgaagagactggttaccaaggaattggcctcgacttcaagtcattcgacacgctccggaacaaccgccttatacgtgatgctttcgcaatactaaagcagaacgtcaagtttggttactactacgacaagatatctggcctccaaaagggcagaaccggcgtcgatgtccgtgcagagaaagccttcgacaacattatggaatacttcatccatacgcccatgttactacctaatggacgtattgtgacaaaacaccatggtatcccatctggctctcacttcacgaatctgattgactcaatcatcaaccgaatcctgatcaagaccttcgctctttatgaaggtattccgatccgacaactcaccaccaacggtgacgactcagcttttctagcttctgagacctacactcctggtctcctcgagaagtcggctgtgttcttcgacaaattcttcggaatgacagtttctgttgcaaaatcctgcgttgccacggctccatccgcaatgcatgtttccggcaccacctggtcgtctctgcgaccaacccgacccaccacagagtggtttatgctcgccgcttacagtgatactttcattagtaagccgctcgacagcttccagcgccttttaggcctaggaattgctggaggatttgggaacgccaagtttacccaattcttcatgtacttccagtctggctacgattgcagacatggtcctaaccttctcaactggaacaaactacgctggcttgagcacgcttttggcataaccgacttgccactggtatacaagcaaggttcgcgtaccgttacgcgccttcgcctactcgcc

SEQ ID NO: 1414 - DNA, 1623 bp, Botryotinia fuckeliana partitivirus 1
  source 1..1623: mol_type = other DNA
atggaagaatttactcaagaaccaacccaacactacgtcttagctaaggggtctcatttaattgacgcactccacctccgtcccgataccgggaaggggtcaaccactagcgaagatgtactttcttccgactacaggtcgcccaacttagccgagatcgctcgctatggtggatacagcacctactcgtctaactctaacaccgatccttatgttagagagacattaaaactattttctcgagacacctacgaggatatccgtggtttcactcgccgtcctgaaggcactcctggcatgtacaaggctttggagaagttcagcggtgaaaagaattcattcaatgatttgtccgcaactcaaaaatcatcgatgcgccgtgcaatcggcaaagcgaagaaagcgttcaagttaccttacaaacgtgaaccccttgattggcacgaagttggtcaatttctgagacgtgatacgtctgcaggatcaacattcatgggccagaagaagggtgatgttatggaagagatctaccatgaggcaagatggttaggtcaccgaatgaaacaggatggaaaaggtcgtttcaatccaaccaagatgaggtttcccccttgcttggcaggtcagcgtggcggaatgtcagaacgtgacgatccgaaaacgcggcttgtgtggatctaccccgcagagatgttgacagtggagggtttctacgcccccctaatgtatcgtgactttatgaacgatcccaattcgccaatgttgaacgggaagagtgcccaacgcttgtacaccgaatggtgttgcaaactgagggaaggagagacattgtacggaatcgatttttcgagtttcgacaccaaagtaccagcgtggttaatccgcattgcgttcgatattcttcgccagaatatcgaattttcgacctttcaaggaaaaccagtttctaagaaagacgcgcaaaagtggaggaacgtttgggacggaatggtgtggtactttatcaacactcccattctcatgcctgatggacgaatgtttcgtaagttcaggggtgtaccttccggatcgtggtggacgcagatgattgatagtgtggttaatcacatactaattgattatttggcagactgccaagatgtagagatccgaaaccttaaggtattgggtgacgacagcgcttttcgttccagtgacgagtttcaactcgaaacggcgaagcttgattgtaaacctacgggtatggttatcaaacccgagaaatgtgagaaaacagctgatccagctgacttcaaacttcttggaaccaaatatcgtagtggccacgttcatcgtgatacagatgaatggttcaagttggcgttgtatccagaatctagtgtgttcacactagacgtggcgtttacccgtctgattggcctgtggctcggtggagcaatgtgggataagaggttctgtgaatacatggacttcttccaatctagttatccgtgtcctgaggaggggtggttctccaaagatcagaaacgatggctagaggtaatctactcaggcaaagcaccaagaggatggactactaagaagagtctcttttggcgatcaatcttttacgcgtacggttag

SEQ ID NO: 1415 - DNA, 1740 bp, Botrytis cinerea partitivirus 2
  source 1..1740: mol_type = other DNA
atgtgtctacaacaacctaccaatcttatttatcttggaaaacaaccgatcaatcgacgtactaaacggtttttgatgaaacaatcaagaacttccgatcgagagattcgatttgtggaaaagttaacaaagaaagcaatccatgtacattgttccccagccttagctgaagaaacaatcaatggttaccgccgatccgcaacggataccgaagctggtgaaaatgactttctcaaaactgatctcccctatcacgatgttccccgagactttcactataaacgtgccctcaaaatagttgagaagatgttccgacctcatcgtcgtttgaaacctatagcgtttcccgaccttagatactacccttggactctaccaacctcagcagaagcaccgtacaccgaaagtacctattggcagaaccgtgttgctcagaaacaatctgaaggtgatactgatgatgcgagactatcgtttcacaatctctacaacgagatatttcatatcaaccgacaactcgtccatgacattaaatatggccgaaaacccttctggactacaaacggagaacccgtaccctacgagttcacatacttacactcacgatctcacatggtcaaacacgacaaacccgacaaaatcagagcagtatttggagtacccaaattactactcatggttgagaatatgttcatctggaacctccagcgtgaatacctcaactcccccctcggttcgtcacccctcctctggggatttgaaaccatacgtggtggatggatgaagcttttgaacaagctaactggaaaatcgtttaacaccgtactctctgcagactggagcagctttgatcacaaagcacttcacgaagtaattgacgatgtccacgatatctggcgaagctggttcgatttcgatcaaggctacgagccctcgattagctacacccacaactactcagacactatgtcacgcgaagagcagattgaccgactctggacttggatgtgcaatgcaattaagcatacgcccatcaaagcagaatcaggcaatatgtatcaatggcagtggaatggaatagcctccggcttccaacaaacccaactccttgactcatttgtcaatgcaatctatctcttaacatgcctctcctcaactggaatcaatatagaaagcgaacactttatcgctctatttcaaggtgatgattcaatcacaaccttccccgaaatgatccctgacacgaaagcatttatcgcaacccttacctccgaagcaaaacgacgttttaacgccgatttgtctacagacaaaacaacaattggaacctcccccgatgatgttgaagtcttatcttatggtaatacatctggaatcgcaacccgatctcccgccgagctattagctcacctcctctaccctgaaagaccccgacgcgctcccgaagccgcagcagccgctgctggtatcgctcaagccgcaatgggatgttcttctcaagtatataatacttgtcaagacgtctacaactttttagttaatcagataggagttaaacccgagtggaaagaatggtctcccaacaagatcactccctactccatgaacgtccaaaagttcccgacttttaccgaaacattcttacagaatttcgataaacgagaacgcgacgcccatgaccgaaatctcctttggcctagcaaacctactggaaatggatttcacttcttgaatgattag

SEQ ID NO: 1416 - DNA, 1620 bp, Botrytis cinerea partitivirus 3
  source 1..1620: mol_type = other DNA
atgaataaaaatgtaatttacgatgaccctgtcgatgcggttgaaccgtttcttggtgacaacaaagaaacgtttctactctgggatgctagttcttcatcccgttcaagagttaccgctaacaccgactttatagaacagcccggcctaaaggagatagctaggtatggtggatactccacatattcagctcctggtaacacagatccttgggtgcgcttggcactaaaaatacatgaccgtgaaagatatgatcgcatctacggtttcacccgacgaccagctggtctcgagggcatgtacaaagcactgttccgcttcggcgaacaagttaacgaattcaagagtttatcttttgatcagcgcaattgcatgcgctcagcaattaaatccgctcgctctgctttccgtttaccggtaaagcacgaacctcttgagtgggaagaagttggccaatacatgcgccacgacacttcagcaggagtgaccttcccaggcaagaagaaaggagaggtggctgctcagatatatactgaggcacgttggcttggacaccgtatgaagcaaggaggtaaagagcgattcgatccacgtaaggttcggttcccgccgtgtttggctgcacagcgaggacacctgtctccgagagatgatccgaagacacggcttacgtggatctaccccgcagagatgttagtcattgagggcctttgggcgccagtgatgtatcatcaattcatgagcttgcctaacgggccgatgctatgcgggaagagttcacaacgcttgtataccgagtggattgtgaactaccgagaaggggagaagttgcacggtttggacttctcagcatttgattcaagtgtaccacagtggttaatccgcactgcatttgacattctgcaccaaaacgttgattggttgaattggcgtggtaaacccacaacaaaacgatcacgccaaaagtggcgaaacgtatgggacgggatggtttggtactttatcaatacacccatcttgatgccagatggccggatgtttcgaaaacgtcgcggtgtaccatctggaacctggttcacttcgttagttgactcagttgtcaactatattatcgttgaatatttaacgaagtgtcaacaagtggaagccaaaaacctgaaagttttaggtgacgactcagctttcaggtcaggtagagcacttgatctcgaacagtcacaaaaagatgcagacgtactaggcatgaacttaaatgtcaaaaagtgcgatgtgactgaagatccgaccgagttcaagctgcttggaacaacttatcgaaaccaacgcgcacaccgcgaggacgatgattggttcaagctcttgctctatcctgaaaatccacctcctgacataggtacgagtttatctcggcttgtgggtttatggatcggtggtgcgatgtggagccatgaattctgtagattcatgacattttatcaatcctgctacgagtgtccaacggatggcactttcacaaaggatcaaagaagatggctcgaaatcatccacggcggcagcgcccccagaggttggacatcgaagaagtcccttttctggagatcgatattttatacgatctaa

SEQ ID NO: 1417 - DNA, 2136 bp, Bremia lactucae associated partitivirus 1
  source 1..2136: mol_type = other DNA
atgagcacttcaaatcctatccgtgactacctatccgaaagaaaccttcgaatcaaaaccgaatggaaactttttcaacagtcccaaactagcgacgaaacactttcacagttgacctccgactctgacctcaaacgcctatatcatggctctagacattacttaacagaacaagagaaatctcatgccctacaatctcaatttgatcaaatactacatgatctaaaaattaagaacactgacaaacacgaacccttcgagtattttactctccgttcacgtcccgttcctccaacccgagatccttcccctggcattactctcctcccgttacaatatcacatcggtcaaatcgttacaacaaccgaaaccgtaaccgaacaaggcttcccccttgatccacttctaaccacacttttgacagcaaagtatccacaatacctcgcatttactcaaaaatactgccgcccccttggaaccactgaatccactttcgttgattttaacaagccacaaatatacgtacctccttcaactccagaacgtaaagaacgcatactgaaacatattttcagatacttaaatgctaaaccttatctacccgttcactttgttgacacactgtacgcaggactccccatatctactggaactggttatcacaaccgacattcctacaagataaaagctcacgctcgatattcacatccgaaagaatacgctaccaaacctacatctaaaggctattttctaaatgctttcctagaacaggctcgaacaatcgttcaccgtattaaatcttcaggtctcccttttcaatggaatctacctaatgatccaactgaccaagatcttcaagctctatactctagacttaactctttcatcaacgaatacccgacactcttattcacacgtaatcacatttctgaccgagatggaaaacttaaacaacgccccgtttatgctgctgacgaattattcctcaccatcgaaacaatgcttacttttcccctcctagtacaagcacgcaactatcattgctgcattatgtacggtctcgaaactatccgaggatcaaacgtttacctggacgctttagcccagctattcaaatccttcttcactattgactggtctgcttatgatcaatcacttccccgcactgtaacttcaagttactatgaagacttcctcccacgcctgatcgttataaatcaagcatatcaacccacgtacgaataccccacgtatcccgaccttactgaacacgacatgtacagccgaatgagaaacctcctctctttccttcactgctggtacaataacatgaccttcttatcacaagatggctttgcttaccgtcgccaatttgctggtgtaccttctggtatactcaacacacagtatattgactcctatggcaatctttatttaattattgatgcattcatagaattcaaactcaccgaccacgaaatcgaagatgtcctcctatttataatgggtgatgacaactctggcttcacacactggtccataactaaacttgaacagtttttaacgttcctcaccgaacatgcaaaaacaagatggaatatgactatttcacctaccaagtcagttactaccacacaacgacaatacattgagactctgtcttacaaatgtaactttggcaaaccgcttagaccgttaccaaaattagtcgctcaactatgttatcccgaacatggcatgatttacaaattcatgtcttatcgtgcaataggcatcgcttatgctgcctgtgcaatggacgttactttccacaacttttgcaaggatgtatattattcataccttccataccaagttgaactaactcctgatgttatcggaaacatcgtaaaatttctccccggacaattcaaaatgttagactcctatgtcgaaacacttgatctatccaaatttcccacactcgaaaatgttgcaaacacaatttccaaatggcaaggaccactatccttttcaccaaaatggaatttcgcacattttattcacgcgcctgatacgacgctccctcatcctaagactatgaaacagtacgaagacgaaaatgatttaatcattccgcctcctcctgaattatag

SEQ ID NO: 1418 - DNA, 1181 bp, Broome partiti-like virus 1
  source 1..1181: mol_type = other DNA
aataacacgaaaattccatacgcacaagctctgttcggcacccacgtagcgctcaatgcgcggagatctgagttaaggttttctctcatcaaacgtgacatgctcaagatgggaagtaaccctcatgtcatacatgatgataagtttggatacgttgtacgagcagcctgggacaaattcaagttgacaccgcagcatccgatccacctcaacgacatcttcttcaaggatatggatattcggaaatcgagtcctggattaccctggcagccagagtacaaaacccgcggcgaagttatggactgtccacatgcaaggaataagattcgatggttttggcatcgaattaaagccggagaacgtgtggtacccgacgactgcaaagttctctaccgcgcacacatccaacgagacgaaccgaagatcagggcagtatatggatacccaacgactatcacactcatggaagcatgttttgctatccctctgattgatcagtttaagaaaggtggaaccccactggcgtataattacgatatggcaaccggcggcgcctatcgattacgtcggcacattggtggatatcggtattttgggtgtatcgatttctcgggtttcgacaagaccgtttctgcacaactgataaagatagctttcgccatattggagcagagtatagacatccgacgttatcactatcgaggagtaccagatgctaatcgactttatcgagcatgggactacctaattgaatattttctggagacaccactacgactatgcaacggcgaacgatggaagaagaaggctggagtaccaagcggatcctacttcacccagcttgttggatcgatcattaattggattctaatcaactatgcattcttgaagcggtatggacgaatgccgcgtgattgcaaggtgtttggagacgattccgttgtgagcgatgatcagccattttccctcgacggtttagcgtccgttctcgaggatgttggaatgaaggtcaatcgtgaaaagtctatctacactcgtgatgtggatagtgtggagtttctaggatttaggatagaaggtggttttccctgtcggaacctggataaatggatggaagcgctgtttcatccagagtggccggaccaggattgggacggatcgggagagcatacaaggggact

SEQ ID NO: 1419 - DNA, 1308 bp, Caledonia partiti-like virus
  source 1..1308: mol_type = other DNA
tggcaccatgctatgcgcccttcccgctttattaaaccctattactttcgatgcaaaaggcaaggatggaccaggaggattacgagcgaccgttctctccgcctgtggtgggatggataccaaaaatgtcgaagatttgctcgaagtgcacaatgggatgaagagaggttggatttggctatttcgtccgttcaaaaagaaatgcagcagagattcggacgcctgcaagccattccacttgaccaagtgagagacacctttcaagacctatcacgctccgccggacactgtttttttgataagtattcttgcaaacgggacataccacagtgtgaattggatgagtgtgagcgtgtgctgcagtataagggacctaaagacctccccccttatatgatttcattccgtaatcaaatcaggaaaggagagccaaaacagcgaatcatcttagtgagtcccggacctcttgctatggttgagaagcgattcgcgtggccccttcaaaaagcgatggagcacggggcgtatcctcgtccttgggcaaccggttggtgttggttcgcctctggcggttctcaagtgacaccgtttattgaagatcccactacagtcagcctcgacttcgagaagtttgattacagtcccccaactttcctgatcagaaaaatcttcaaaatgatgatgtctctattcgaactcaccccctcagaattagcaattttcaagggtatctctcgttcccatgtggactcccttgccaagtatggagaccgggtctatcatcttgatcaaggtattcgaacaggatcgtccttcacacacgttattggcacgttggtgtgtatggttatgatcaggtatctgtgtggtattgatatctctgctataagctatggcgatgacgcgatgtaccgggggggaccacctctgaagaccgtgtgtcgtcgggcagaaagtaccagctttcggattagtcgtactaaatccaagcacggagtgcagtggctgggttacaagtggcgcgatgatagatgggtgtgcgaagatccagacagaagatgggctcagtatttttggcctgaaaaacccgggtgtcccgaggctaggcttcaagctctgttcctaaactgtttgtccgaccccatgcgcgttccactaaaaaaagctcttgtagagttaagtcttggtgtagttctccaggagacggctgagttgataggtgctcaccgttaccccatcaccattgaacctggtgccgacatattcgaggtcgaaaagcgtatgaagcgctaccatcgtcttgattga

SEQ ID NO: 1420 - DNA, 2271 bp, Caloscypha fulgens partitivirus 1
  source 1..2271: mol_type = other DNA
atgcttaccatctcccagatcgtaaccattaacatccttctccgcttccaacatcgtcgcagatcaggcaacatccccaaacaagtgtcccatccaatccggaacatctactatgaatggatgattagatcccaaatccccgaagacgcctcgcttcaacaatacaacgttgactactcacgcacacttcttcattacattgatctcaacaccaacttcaaagtatccgaatcaattcgcgaaatccaagatgatttcttcgaacgctacacatccctcgatgagcctttcaatctacacactccgcacgatatcctcgaaatcccagaaaaccgaatcccctccaatggtctcaaaatcctccccttccgataccatcaaatatcccccggtttaatttcacatcacggaaaagaatccctcacatatctcgatcccttcgctccagaaacaccagactccagagaaccctactccttcaaccctgaagttgacctcacaggttcccccccacacccggaaatcgtccagattatccatgactggttcccaatgtttgaacaacacattcaaacgtactgtcgccccccatcatacggtccacaagccttccaagacttcaaccgccctacggatccgataccccccccttcacctcaacgtgaaaacgacattttaactatcattcgcaatgtatttgctatcagtccttaccgcccactacacttcgtagacgccctcgctgctaacacccccaacataacatctgcctcctatcatgataagttcgacactaaagctaaagcttacgctcgctactcgtcgcccgctctttacgccaatcggccacaatcaaaaggttaccacttcaatcacatgatgaacaccttccgccttgacgctcacaaaattaagaacgccgaaatcacactcccttggaaactacaatttttcctcgatcacccaacccagctattcattcgctcacaaatcagcttacgagatccaagcacaccaaagaaaatacgtccagtatattctgttgactctagatttttacatttagaaaagatgcttaccacaaatctcctcgctcaaatgcgaaatccccaatgctgcgtcctccatggccttgaaaccttcagaggtgcaatgtctgtcatagacaaaattgcacactctttcactgcttacgtcagtctcgactggtctaactttgatcaacgcgcaccccaacccgcaatcaagtgctactacactcgttttctcccctccctattaatcgtttcacacggttatttcccctcacgtggatacgaaaatactcaacaacccattgatatttttgccacaaaagtatttaatatcctttcgttcctgtacctttggtaccgcaacatggtattcctctctttcgacggttacgcatacacacgcctcaacggtggtgtcccctcaggtctactgaacacacagtctctcgactcgtttgttaacatgtacgtcctcgctgactgcttactcgaattcggatttacaatccaggaaactatggaaatgatcttctttatactcggtgatgataatattttcttcgctagaatgaacttttctagaatcgctgattttatggtctttcttgaagactacgccaaacgccgccacggcatggttgtctccatactcaagtccgtatattcctcgcttcgcacgaaaatttctgttctcggctacgaaaatacatatggcatgccaactcgccctttaggcaagttgatcgcccagctttgttttcccgaacgtcccgttcccgatgacaaatcttggatgcacgccgcccgagcccttggcttggccacagccgcctgtggacaagacgctgactttcatatgctatgctacatggtatatcagaaattcaagcctaccaacaaggtcacctccgcccagtttcgtaaagtattaaactacgctgtcttagaatcactcgattttaagttcaccgaatacatgcttgacgtccctgagtttcccactctttatgagatacgctccaaagtctccagttacgctggccccttcaatgaaaaagacaaatggaaccgctcgctctttaaagatgtacctccgtccgacaacctcaacgacttcgttaccttagacacctggctaaacacccacccagaacactcatttgattctcaaaatcatatgcaaggatacgactctcctgactttttgtccgtcgatttctcaaaattatctatttaa

SEQ ID NO: 1421 - DNA, 2163 bp, Caloscypha fulgens partitivirus 4
  source 1..2163: mol_type = other DNA
atggaacacctccgtaacctcctcgctgagacacgctttcgcatcgcttcccgctggcaaaactttggaaaatcgaaccccctgtccgaatccgaactacgctctgcttaccaagcccaaaagaccgacgcaatcgctgaaatcctcgaccgtgtagatgaatccacatatcatcagtacctttccgacattcaagaaacttccgctcaatcatccgagccttttgaattctactcacttccccatgaaggcactacaatacccgaaaatcgacttcccgctcctggcatccgccacgtcccgctcttctaccaccgcggccgcattgtccaccaagttacccccgatcgcatacctgaccgtatgaccgaagattcattcgaatcgacctacccaggcgactctgactttggctatcccatcgatccactcattttgatcctcgtttcacgaaaataccccgagtatatgacattcgtccacaaatattgccgccctgctggcactaccgacgctaccttcaaagactttaacaagcctcaagttcacactcactctgacactcccgaacatagagacaaagtcctccatcacatcctccttttcacagactccaaaccgtactcacctcttcattacgtcgacactcaatacgctaaactcccgctcactaccggaactggctaccacaaccgacactcttacaagatacgtacactcgctcgcttcacccgacctgacgaatacgcccaccgcccacaatccaaaggctacttctacaacgctcaacacctcctcaaccgaaacaccgttcataatctcaagaacgcacactttccttaccacattgaccgtacctacacagatcacgaatactcccgacgctggaacgtctttattaacgaacaccccacgatcttattcacacgcaatcacatatcgcaacgcgacggcatccttaaagtccgccccgtttacgctgttgacgacctctttcttacgattgaagttatgcttacatttccactactcgtgcaaatgcgaaaaccatcctcatgtctgatgtatggcctcgaaacaattcgcggctctaacgtctttcttgaccaaatcgcccaaattggacgatatctgtcatttttcacaattgactggtccggtttcgatcaagctctacccttctacatcgtcttagtatactacacagttttccttccccaactgatagtcatctctgctggttaccaacaaacatatgattacgactcaactcatcttgacaacgatgaacatgcattcttcacgaaaatgtttaacttacttacctcactcattacatggtacgttaacatgacattcctttccgctgatggccacgcatatcgacgaacattcgccggtgtaccttctggtctattcaacactcagatgctcgactcatttggaaatctttacctcttaattgatggtatgttagctttcaagctcacagattccgacattcagtccatcttactcttcgtactcggagacgacaactctggtttcacccactggacgatcgccttcctcgaatcattcatcacattctttgaatcatattctaaagaacgctggaacatgaccttatccaaaactaagtccgtcattaccccattccgcaacaagattgaaactctcgcataccaatgcaatttcggccgaccccgccgccccattggcaagctagttgcccaactctgttaccccgaacacggtgctaaacccagcactatgtccgcaagagctattggcatggcttacgcatcctgtgcgcaagacaaaacattccacgacttctgtcgcgacgtttactacacattccttccctatgcagaattagaccccgcttctctctcaaagaatcgcgctttccttccaaactttttcaaactatttgaagaatccgatatctacatcgacttctctcacttcccaacactcattgaaatctctgaccgcatctcccgctacgctggacctctcggttttgaacccaaatggaacaaaagccacttcgtcaacgaccctgacgttgttcccccaaactcgaaaacgatgtttgaatacatgaacgaacacaatgttcagtttccagacttcactcctttcgaaacggtttaa

SEQ ID NO: 1422 - DNA, 2151 bp, Caloscypha fulgens partitivirus 5
  source 1..2151: mol_type = other DNA
atgctctcacactttcgtgactttctagccgaaaaactagctcgctcaagactcgaatggaaaactttccaatcaaacgtcaaagatgcacaagctactctctctgcctcacaagatcccgattatcaacgtctatatgactccttcacccacacttttgacacctcaattgaaaccgaagccttcaacaacatgatctcttcacagatacaatatctaaaagaagaaaacactcgccgccgccaaccatacgaattctattcctacgaacccgactacgaacttcccgatcatcgcttacccgctcccggcatcatcaacctcccgctcaaataccaccgtggccaagtcatctacgcaacagctcacgcatctcaactgtacgaccgccccgtcacagaagaaacatacgaatcatcctaccctggagactccgaccttggacaacccctcaatccaatgctcaactttcttttcgaccacaaatggctccactacaaacgatacgcacaacaatactgtcgccccgccggtacaaccgacgctaccttccttgatttcaacaaagaacagattccctctgctcctatcgatcctttccgcaaagacaaaattatggctcacatactcacaaagctcgctgtcaccccctatcttccgattcatttcgtagatactcaatttgacaaccgcccctcctcaacaggcactggttatcataaccgacactccttcctccgaagagcacacgctaagtactctcatcccaaaggcactgaaaacaggccccaatccaaaaaatatttctggaatgctacctatcactacgcccgcacactctttcatcagattaaaacgactggctatcctttcaccttccacctttccgaaaatcctaccgatgacgaaaaactccatttcatcaacgaattcaaccactggattaatacttacccaacgatcttatttactcgtaatcacatctccgaccgagacgcgactcttaaagtccgccccgtgtacgcagtcgacgaactattcctattcatggaatcaatgctcacatttccttttatggtacaatgccgaaaggctgaatgctgtataatgtatggacttgaaactatccgtggctcaaaccacttcttagattctgtctctaaagcatactcgtccttctttaccatcgactggtccgccttcgatcaacgcctccctcgcgttatcaccgacctctactattctgattttctcccccgacttatcactattaatcatggctatcaaccgacttacgactaccccgactaccccgaactaaccgaagacaaaatgtacgaacggactaacaatctgctccattttctccacacttggtataacaacatgaccttcatcctcgccgatggacatgcttaccgcagaacctctgctggtgtaccctctggactcttcaacacacaagttctcgattcatttggaaatctattcctcataatcgacgcactcctcgaatttggctgttccgatcaagaaattgacgaactccttctcttcgtaatgggtgacgacaattctggatttacattctggacaattgttcgacttgactcgttcataactttcctcgaaaagtacgcattactacgttacaacatgactctctcaaagaccaaatcggtcattactaccatgagaagcaagattgaaacgctaggctacagatgcaactttggctcgccccgccgagacattggaaaattagtcgcacaactttgctaccccgaacacggactgcgcccgcagtttatgtgctcacgtgcaattggaatcgcttacgcctcagcaggccaagatcccgaattccacgcattttgcaaagacgtctacacactgttcctcccattcagaaccgacctcatcgatcccgaattcaacgtgttaaactacattccctacatcttctcccaacttgacgatttcacgcaacgactccaaaaagacttcccttctatcgaacacgtcctcaaagtctattcctactatcacggccctctcacttacgcgccaaaatggaactacgctcatttcatcaactccccggatgtcacaccccccatggtggcgaccggtagccgtttacttagatag

SEQ ID NO: 1423 - DNA, 1434 bp, Camellia cryptic virus 1
  source 1..1434: mol_type = other DNA
atggatcaccaattcagaggagagcgacaaggtcttatagagcttggaactatcccggaaaggcgatcgcgtgaagagttcaaggtcttagttgatccttatgctgctgaagctattagggtttacgtaccttacacttttcgccaagagcttgaggggtgggctaggagttattactcactacagcaacatgtcgatgcaatactcgcgtatcagcgtcagaagttgccggaacctaccgatgatgcttggaatcaaaccaagcaacatgtccttacagagttcagaagaatgaatcaaatcgatccgatttcgtataagcgattcgacgatgttaagtggattcaatcctctgccgcaggttacggttatattggtcgcaaaggcgataatgataactattcaaaagccaaacggactgctgtgactattgcagaagcactagaccatgacaggaactatggacccaaagctttacttgactcgacaccagatgttgcattcactcgaacgcaattatcacaaattaaggtgaagagcaaagttcgaaacgtatggggtgaagcatttcattatgtccttttagaaggattgtttgctgatccgctgattcggtttttcaaaggagtagaatcattctatttcataggagaagatccgttgttagcagtacctgcgttgatcgaggagataataagggcaaaagactatgtctatatgtttgactggtctggctttgatgcctcagtacaggaatgggagattaggttcgcctttcagtgtttggagtctttattacgtttcccgtctaacgtagaggcccaaatttggcgtttcttaattgagctgttcatatatcgaaagattgccggacccaacaaagtattgtacttgaaaactcagggcataccgtctggtagctgtttcacaaatattattggaagcatcacgaattatgttcgtatccaatatatgttcaagaggttaaccgaccgattcgcgctagtgttcacacacggagacgacagtctcgcaggcgtggaaacaactcaattcatccaaatggacacttttgacagtatttgcgttccgcttttgtggaagatcaatattgagaaatccgaagtatccagaaagaacgaaaacatatcgttcctcagtcgcacagtgaaggagtatcagaatgctcgcaatgaactggcctgtttaaggatgttaatgtatccggaatacgaagtggtatctggtgatatttctgctttgagagcaaagagtatctgccgcgacgccggaatcaactcccgttatctgtttgaaatatttatttatctcaaagagaaatacggtttagctgagtctcttccctttcatttgaaagtctgggacccaaccgaatttgaagcacgaagaatttctgcttctgaaattatgtaa

SEQ ID NO: 1424 - DNA, 1430 bp, Camellia cryptic virus 2
  source 1..1430: mol_type = other DNA
atggcataccggaatttgaatgggtatgattttgaaagtttcgaaacagaattcgaagacttgaatcatttccatccacatgtagtcagacgagaatcagaaacaatctatcgtgatgaatttgctttgcaagttatccgagaagaatatccaatcttttgtgagcaagagctcgaaggttgggcaagaagctactataccctggacgggcatatgaaagcaattttcgcctattctacagaagatactccttttacagtcttgcgtgcgtccaaatttgcggaagcatatcaagctgttcagaatgagttacgtagccttcctattgcgagggcattcgacgtgcaaactgaattagatcagatacactatgaacagtcctctgcggcaggttacgattacatagggcctaaaggacctatattgggtgataaccacaaacgggctattcatcgtgctaaagctaccttatggtcagcgattaaagatcgagaccaaggtatagagtacgtgattcgaaattcagtcccggatgtcggatatacccgcactcagttaacggacttaaccgagaagactaaagtacgaggtgtttggggacgcgctttccattacatccttttagaaggtacagcggcaagaccgcttttagaaaacttcattaacgcacggacgttcttccatatcggagaagatccacaattgagcgtgcccagagtgctttccgaagttagcaagaaatcgaaatggctttatgctgtcgattggtcaagctttgactcctcagtgagtcgatttgaaatcaacgcagcctttgatttaatcaaagagcgcattaattttcctaatttcgagactgaaatggcgtttgagatatcaagacaactcttcattcataagaagattgccgctccagacggccacacttactggtcacacaaaggaatcccttcaggaagttactatacttcaataatcgggtcagttattaacagacttcgagttgagtatttgtggcgattgaagtttaatcgaggaccaaacatttgttacactcaaggtgacgattcattaattggtgatagtgaactactacaaccagatgaactctccgagttagcaagaccttacgattggacaatcaacgctagcaaaactgagtattcgacttctccagagtttatcacatttcttggtagaacaacaagaggtggctttaattcaagagagttagtcagatgtatacgcttattagtgtatccagaatatccagttataaacggaaggatttcggcctatagagcacagtctattgcagaagacagcggtgcgatgagtgaagtcatcaacctaaccgctctaaggttacgcagactttatggcatagctagagaggatgaagtacctcgttatttcgttcgttattatcc

SEQ ID NO: 1425 - DNA, 1159 bp, Canna indica partitivirus
  source 1..1159: mol_type = other DNA
atgggtcataatcaacatttgattaccgatccgctgtttaactatatcgtcctcgaggcttttgaaaagttccgacttccgaaaagagttgctccaattcatcttaatgatatctttgaaatgcctcttgaaattcggaaatctagtgctggctttccttggtcaccacttttcaaaactcgtggcgaggttatggacgatccatccgctagaaactccattcgttggttttggcacagagtcaaagacggtgaaaaattgaaccctcccgactgtaaggttctataccgtgcacatcttgaagatagtggttctccaaagatacgagctgtttatggttaccccaccacaataactttgggtgaagcctgttttgctatccctttaatagaaggcttcaaacagcacaagactccacttgcatatggttacgatatgttacttggtggagctcgtaagctcagatccgaaatcaaaggttacaaaaaccacttatgtatggactataagggatttgataaaactgtttcatcacagcttatcgaattagcattctccatccttttacaaaaccttgatttcactcaatatcgggaacaaggaacacctgatcttgagcgtctcgtaaatatgtttacttatatcaagcattacttcattcaaacgccgatgcgtttatataatggagaaagatataagaaaactgctggtattcctagcgggtcatattttactcagcttgttggttcaattgtaaattggatcataactacctattcttttacaaaagttgtaggtcggatgccagactatttacgagtctttggagatgactctgttcttagtagtaactctactatacccaaatatctaattgccgaagtaattgagaacttaggtatgatgtgcaacctaaacaagacccttctcaccacgaatgttgatgatgttgaatttcttggattcaagatcactaacggttttcctcaaagaaagttccgaaaatggcttgaacttctttacaatcctgaacgtcccgatgactcttgggatatgtttgcttctcgtgctctaggactgttttacgctaaccatggaattgactctcggttttctttcatgtgtcgtaacgtggtaaatcatcgtcctttcactattg

SEQ ID NO: 1426 - DNA, 1851 bp, Cannabis sativa partitivirus
  source 1..1851: mol_type = other DNA
atggactacctcgtttctgcttacaatcgaatcactcagtggttcaatcacccaacaaatctcgaacatgtagggaacttcactcttccctctggtttactacgtgtcaatgacgttgcaatttctaaccataaagcaacacttgaccacgcctttagcaagtacctttactcacatgagatcgaactcatcactaaggactaccgtcgttcagacatagactacgactctatactcaccgacttcttcgctggagacgttgaacctttcgaaatacctttcgatgaacacgtcgaaaatggcctccaatgcatggctgatgcttttcgccccccaaggcgttgccgccctgctcacatactggatgtccaacaaggctacccttacaagtggaacgtcaatgccgaacccccgttctcaactgacgaatacttcttgtctaaacgtaagaccttcggtgaatttatccgtttgcacgaatatgaacacatcgataaagctgacttcttccgtcgtcacccaaatcctgaatcccatgacttactacgtaccatcgtacctccgaagtttggctatctcaagtcaatgatcttctcctggacgcgtagatggcaccacatcatcaaatccggattcacagaatctactggactacaaacgactggttatttctataaccgctttatctttcccatgctactacacaccaaaactgctatcgttaaaaagaacgatcccaacaagatgcgcaccatctggggcgcctctaaaccatggatcattgctgaaacaatgttctactgggaatacatagcttggattaaacttaatcctggagctaccccaatgctttggggctttgaaaccttcaccggtggctggttcagactgaaccatctgcttttctgtggatttatcaaggaatcattcctaaccttagactggttacgcttcgacaaacgagcgtacttcactcttcttcgtagaataatgtacatcgctaaatctttcctcacctttgaagaaggatatgttccaacccacgcagttccgtaccatccgcaatggaatcaagaaaagatcttgaaccttgaacgactttggctttggaccctcgaaaacctttttgaggcacctatcatcctacctgatgggcgtatgttcaaacgtcacttcgccggaataccttcagggttgttcaccacacaactcctggactcctggtacaatcacactatgctcgccaccatcctgagcgcacttggcttcaacccttaccaatgcattattaaagtacaaggcgatgattcaatcattcgcttgacagtgctaataccaccttctgaacacatcaaattcatggagcacctggtcaaattagcaaactactacttcaatgcaacgatcaacgtaaagaagtccgagatccgcaatactttgaatggctgcgaagtactctcctaccgtaatcacaacgggtatcctcatcgagatgagatcaccatgcttgcccaattctaccacacaaaggcaagagatccaactcctgagataacaatggcacaagccataggctttgcctacgccagctgtggcaatcacagtcgcgtactctgggtactagaagacatatacaattattatcacgacctcggattcacaccaaatcgagctggtctcaccctaaccttcggtgactctccagatctcatggttcctgaaataccgcttgatcactttccaacaaaacaagagattaggaattatttaactttttctaactattgtaatgaagcacaacgcgcacggacttggccaaggacactgtttatcagtgaccctgctgagtaa

SEQ ID NO: 1427 - DNA, 1428 bp, Carnation cryptic virus 3; identical to SEQ ID NO: 624
  source 1..1428: mol_type = other DNA

SEQ ID NO: 1428 - DNA, 2289 bp, Ceratobasidium partitivirus
  source 1..2289: mol_type = other DNA
atgttcacactgtacaccctcatcctcctccgaattctcataaaattccaattccgtcgccgaagaaatcaaacccttcccccgaccacctacccaatccgaaacattctctttgaatgggaacaccgccgttctatccaagtcgaccctcaacacgtcactaacgacacctcgctccacttcaactatgcttcctcactcctctgttatatagacatgatgacatgctacaacatatcaatcactatcaatgacatgcgcctcgcctatctcgaacgctatcacgctctcgatgaacccttcaacctacgcgaaacgtattatgatgaccctccacagtctcgaatccccgctcagaatatagaaatcctgcccttcaggtatcactcgattccccccggtatgctaaatatcgatgacgttaatcaaaacatcaccaacgattctgccttcacagaaacgccagatgaacgttctcactatgtatactcagatgatgcaactcagcccgacctcaccggcttccctcctcatcccgaaatcgctaaaattattcacgactggtttcctgtatatgaacaatatctctccgaatactgccgtcccccctcctttggtccccaagcctttgccgacttcaatcgcgcaacagaaactaagccaagactcgaccgcacacgacatgaccttgtaatgatgattctacgcctaaaactcaacatcaagccttaccgtccactccactttgtcgacgcccttgctgctgaaacgcccctcaacacgtcagcctcgtactactctaagtccgacatcgactcacgaatcttcgctcgctactcctcacctatgcgctacaactcaaaaggtacttcaaaaggtttccacttcaatgtaaccatgaacaccttccgtcacactattcacaacattaaatacttcggtaccccccacgaacccctagacccctatgatgacgaactcaaccacgccctcactatgtcctacttccatgaccacccaacgcaactcttcattcgcacgcaaatctcaaaacgtgatcccagcttatccaagaaaatccgtcccgtctactctgttgacgaacgattccttcacattggaaaaatgctactcactaactgcctcgctcaatgtcgcaacgctcaatgtgccatcgcccatggcctcgaaacgttccgcggctctatgtccttcctcaatcgcgttttcatgtacttctcgttcttcatttcgctcgactggtcccaattcgaccaacgtctaccgctttatgttatactcgctttctaccttgacttcgttccctcgctgctcattgtatcccacggatacttcccctcctttggatacgtagacacctcttctaccgactcttttgcagaaaagatcttcaacatcctcttcttctacattcaatggtatttaaatatggtattcctctcttatgatggtttttcatttgttcgccttttcggcggagtcccttctggactccttgaaactcaacttctcgactcatttggaaatctctacatcatattggactgcctattagaatttggcttcaccccagccgaatgtctaatgatgctcttcttcgtaatgggagatgacaatctaatcatgaccatgattggaccgtcacgcatgtatctcttcctcgcatttctcgacaactacgtcgcgaaccgccacggtatgatcgtctcgatcctcaaaaccgtcgcctccaacctgcgctcaagacttaccttcctatcctacgaaaactccgaaggcatcccgacccgcccgatcggtaaactcgtcgcacaactcgcattccccgaacgtcctgttccaaagcacaaagaatggctccacgccgctcgtgcccttggactagcctacgcttcctgtggccaagacgctaccttccacctactatgcaagttcgtgtatgacaagttccgcccatcttctcctgtccccgcaaatgacgtcagaaaaatcttcagtaaatggctccaccaattggacctcttccatatcgatgagacccaagcctactacacttttgaagaatttccgacttatcatgcaattcgcgcctcctgcgccgaatatcaaggacccttttccgagaatgataaatggaactttaacctgtttcccaatcctccgtccgataatatttccgaatatgtcacgttgaaagaatggatcaactccagacccgctctcctccgcaaaatcagccaaacatttgactggtacgacaccctttag

SEQ ID NO: 1429 - DNA, 837 bp, Ceratobasidium partitivirus-like
  source 1..837: mol_type = other DNA
ccaccaacgcccctcgcactcacaacttttatcttcgaaagaaactactcccacaaaccgcgtcccacaatgcctttcaactccgtccgcaactacttcgctgaacgcattcaaagaattcgcaaagaatggcaatcttatcaaaccctcgatgaagatccctccgccgtcctatcccgcgcccaagactccgactacaaacgtgaccttgattccttcagacacacatttcccgaacacgctagaacccaagcactcgaatctgaataccaacaactccgcgcaacctatgaactcaagaatgacctcaactttgaaccatttgaactattcaaacgcttcgaacatttcgaactccccgctgaccgacaacccgctcccggtatcatccccctcccgactcgcttccacgttggacaaattatccgtcctaacctcgaaacctcccgtcctattcaacctgatgaaatcaccgacgaagcagaaagctacctcccaggcgatattgattttggacatcctccacatcatatcattcaatccctcgttactaacaagtatcctgcttaccaagtatacgttgacaaatactgtcgacctgctggcacaacagatgctacattccgagacttcaacaaggaacagaaaccctctgaacctattcccgaagcaagaaaagaacaagtcctcgcactcgtcaaacactttttagatgctactcctttcctcccgctccattttgttgatacccaatactgcaaacttccgctcacaactggaactggctaccacaaccgccactcctacaagcaaaaatcacattcatctctcacctaa

SEQ ID NO: 1430 - DNA, 712 bp, Cerrado partiti-like virus
  source 1..712: mol_type = other DNA
gaccatctagcgacctccacctgcgactctatggttgctgatctacacgagtataataaggaaccagctaagtgcgttcgggatgacgtatactatgcagttcttaaatctatccgtgaagatttcaagtccttccctaccataataccgttaactatgggtgcggttcctcagagagctgactttccaggtcaaaagtcaccaggtctaccatacaagctacaaggctttagaaccaaacaagaagtcatcgacgccggtctcttacacgagattaatcgtgactggcaaaatattggttttaagaaacgtagggtggatctacctgatgtctgcctctttgctagggcccaaattgcacgtgaaggacgtgagaagattcgcgccacttggggctatcctctatcagtgtacattgaagagggacgtttcttctatcctatacaggacgcaatcaagtctaggtgtcatgattttccgatcgcctatgggtacgagatggctaatggaggaatgcgggtcatagacgaactgttggggaggaatccaggttcaaagtttttatgccttgactggaagcagtttgataagaccgtgcctccttggattattcgcgatgcattctccattctagctgaaaagatagactggggccatgtcgaggatgtggaggtcgctagatggtcgatagggtggaggtcgctagatggtc

SEQ ID NO: 1431 - DNA, 1623 bp, Chiles partiti-like virus
  source 1..1623: mol_type = other DNA
atgagtgaaactacgaaatctcaaaatccttattatttccttgataaggtatctgcgctgcgtggggcttatagtaacttgttcgttacaaatgagctagctcgtcgcagatttgtccagcatgccaaagacacatggactgataacggtaggttccatggcagagacgggacaatggaaaaagcacttttcccctatctgaaggaaggtttccgcgactggacttcaaagaccctcgatgatctcgagtcatatcattacggttttcgtaaggatgtgaaaatgattgctgcagcggttgagagttacgctgcgccccatgctccaaacgcaatttttcgtaaggagtacaggaaaatgttggagagtgttgctagcacacttcaacctaaagtgacgtttacacgtctcaactttcgcgatgtgcgtgagttcaaggaatttctgtcgaataagcgttcttctgctggagtgttcgcatgctacagtattataaggaagaaaggcgaagtagatcagaaaatattcgacatgctgcaaagtatggaacgtaacgcggtccaaaacggttcctatgatgagccaactcagattggaatccgattacaagtcagtgtcccaatagatgaaggaggtaacctcactttgaggtatgaggatgatggatccgtatctctggattttaagcagaagactagattagtgaatatggtgtcattctgtagaatatatacagaattgaagtattcctatgatgtccaagcctactttggggtgcaaggatggtatgctggaggaaaatctatggctaagattggggacaccctgaatgactggcgcagtaaatatctctactgggtttctcttgattatagtaaatatgatcagagtttaccaggctggttcattcgagatgccttcgctatcatacgaaggtggttccgattcagagattctgaagaagaggaagcatttgatattgtggttaatgattttatccacaaaggactagtatcagatgagaaaggtaatatcactcatgtgcacgatggtgttgaaagtggatccatgttcactcaaataattgatacattgtgcaattacatgatggtttactacttctgtattctaaaaggattaaagataggaacagatatcaatttccatatatgtggagatgatattatcattttccataatggcggattcgttgccgttgactacatgaatactattcgcaaagtatttggtgtacgaggtagcgttgataagtctattgtggagaatagggtttgttcgcacgatgatcctgagtatctgtccagaacatggaaatgggcaggtccatatcgagacccacatgaattaatcattaaattgatttatcatgaaaggtggagaaattatggtgatggggagaatgaggtactccctattgaagtactcaaggcgtacgttgattgttaccgtttaggaatgatcgaggcgttcgacgtgcaaagaatcgaggaggactacgccaggtttgccaaaggtggcatgaaggaagaggctgctcgcgcagtcggtggcatagttgcttatgagctaatttacgcaaataaatggcgaagggcagcgtaa

SEQ ID NO: 1432 - DNA, 1434 bp, Citrullus lanatus cryptic virus
  source 1..1434: mol_type = other DNA
atggcaagaggcacagatgatggatttggattcgatgattttcaagcagaccttgaattgattacgggttctcatccccatcaagtcaggcgagagcctggcgtcacttatagagatgagtactccttagaggaactcatgaatataagtccattattgtatgagcagtgcctttctggatggtcacgaagttactatctacatgataagcacatgcaagcaatcatacaatacggatacaaagatgtacctatatcctcaataaacgatcgactctacaaagagtgcgttcatgaggttcagaataggttaagtagccttccacgtgtgagggctttagacgttctgtccgaactagacagtgtcacgttcaagtcgtcctcagcggcgggctatgattacattggtgcgaaaggtccaaaaggtggtgaaaatcacatacgggctatgtcgagagccaaggcaataatgtggtccatcgccgagacaggcgagacaggcatgaagcatgccattgagactgctgttccagacgttggctacacacgcacacaactggcagacattaccgaaaagacaaaagtacgacatgtatggggtcgcgcattccattatattttacttgaaggattaacagctgatccactgatcagagcagttcagagagctgacacgttcatccatatcggtaaagatccgacagttagtgtacccagattactatcagacacagctgagcaatgcaaatggttatatgctttagattggaaacaatttgatgcaaccgttagccggtttgaaattgaagctgcattcgatatcgttctcaaccttctagactttcctaacagagagacaaaactgatgtttgagctttcgaagcaactctttattcacaagaaaattgctgctcctgatggcaaaatctattgggcacacaaaggaatcccttctgggagttactttacatccataatcggttcaattattaacagagttagaattgaatatctatggagaactattacaggtcacggaccaattgtatgttatacacaaggtgatgattcactttgcggagacaacattctgattccacctgagaggttcgcaatggtagcaaacccaattggttggtatttcaaccaagagaagaccgaatattcaactattccggaattaattactttcctaggacgttcatacgccggaggacttaataagagagacttaaagagatgtttaagacttttgatatttcctgaatatccagttgaatccggaaggatttcagcttatcgagcacaatcaatatctgacgatgttggtggtttaggcgatgttctaaacaaattagcagataggctaagacgcaaatatggaattgcttctgaagaagaagttcctgattattttaagagatatataccttaa

SEQ ID NO: 1433 - DNA, 1434 bp, Citrullus lanatus partitivirus
  source 1..1434: mol_type = other DNA
atggcaagaggcacagatgatggatttggattcgatgattttcaagcagaccttgaattgattacgggttctcatccccatcaagtcaggcgagagcctggcgttacttatagagatgagttcgccttagcggaactcatgaatataagtccattattgtatgagcagtgcctttctggatggtcacgaagttactatctacatgataagcacatgcaagcaatcatacaatacggatacaaagatgtacctatatcctcaataaacgatcgactctacaaagagtgcgttcatgaggttcagaataggttaagtagccttccacgtgtgagggctttagacgttctgtccgaactagacagtgtcacgttcaagtcgtcctcagcggcgggctatgattacattggtgcgaaaggtccaaaaggtggtgaaaatcacatacgggctatgtcgagagccaaggcaataatgtggtccatcgccgagacaggcgagacaggcatgaagcatgccattgagactgctgttccagacgttggctacacacgcacacaactggcagacattaccgaaaagacaaaagtacgacatgtatggggtcgcgcattccattatattttacttgaaggattaacagctgatccactgatcagagcagttcagagagctgacacgttcatccatatcggtaaagatccgacagttagtgtacccagattactatcagacacagctgagcaatgcaaatggttatatgctttagattggagacaatttgacgcaaccgttagccggtttgaaattgaagctgcattcgatatcgttctcaaccttctagactttcctaacagagagacaaaactgatgtttgagctttcgaagcaactctttattcacaagaaaattgctgctcctgatggcaaaatctattgggcacacaaaggaatcccttctgggagttactttacatccataatcggttcaattattaacagagttagaattgaatatctatggagaactattacaggttacggaccaattgtatgttatacacaaggtgatgattcactttgcggagacaacattctgattccacctgagaggttcgcaatggtagcaaacccaattggttggtatttcaaccaagagaagaccgaatattcaactattccggaattaattactttcctaggacgttcatacgccggaggacttaataagagagacttaaagagatgtttaagacttttgatatttcctgaatatccagttgaatccggaaggatttcagcttatcgagcgcaatcaatatctgacgatgttggtggtttaggcgatgttctaaacaaattagcagataggctaagacgcaaatatggaattgcttctgaagaagaagttcctgattattttaggagatatataccttaa

SEQ ID NO: 1434 - DNA, 1620 bp, Cladosporium cladosporioides partitivirus 1
  source 1..1620: mol_type = other DNA
atggaagatttcactcaagaaccaaccaaccactacgtccttggaaaggggtctcatttagttgacgcactccaccttcgtcccgcaaagacagggtcaaccacttccgaggacgttatccctcttcacttcgaggaccccaacttacgtgaaatcgctaagtatggggggtactcaacctacagctctaactctaacaccgatcctcaggtgagagagagcctaaagctattcaaccgagacatctacgaggacatccgtggttacactcgcagaccccagggcaacataggcatgtacaccgccttgaacaagttctctggtgagcgtaacacattccgtgacctttccccatctcaacaagcgtcaatgcgaagatcaatcgcaaaggcgaagaaggctttcaagttaccatacaagcgtgaaccgcttgactggcatgaagttggtcagttcctaaggcgtgacacgtctgcaggatctaccttcatgggtgccaagaaaggtgattgcatggaagaaatctatcatgaagcgagatggctaggtcaccgtatgaaacagggtggcaaaagaagtttcaacccttcgaggatgcggttccctccgtgtcttgcaggacagcgtggcggcatgtcagagattgatgagccgaaaacgcgcctggtttgggtatatccagcagagatgttagttgtcgaaggattctacgctcctttgatgtatcgcgactttatgaacgatccactatcaccaatgctaaacggaaaaagtgcgcagcggttgtacaccgagtggtgctgcaaactaagggaaggggagacactttatggcatcgacttttcgtcgtttgacacgaaagtacctgcgtggctgattcgtgtggcattcgatattctgaggcagaacgtcgaattctcaaccttcgaggggaaacccgttgacaaggtggacgcacagaagtggcgtaacgtttgggatgccatggtgtggtatttcataaacactcccattttgatgccggacggacgtatgttccgtaagtaccggggtgtaccttccggatcttggtggacgcagatgatcgactcagtagtgaaccacatacttatcgattatctggcagactgccagcaagtagagatccgaaacctgagggttctgggcgacgacagtgcgttcagagcaaacgaccagtttgacctggaagttgcaaaactagattgcgtgccaactggaatgataattaaacctgagaagtgtgaaagaacaaaggatccatccgagttcaaacttttgggtacaaagtatcgtgacggtcgcgttcatcgtgacaccagtgagtggttcaagctcgcactctatccggaatcaagcgtgtatacgcttgaagtttcgttcacaaggcttgtaggcctgtggattggcggggcgatgtgggacaaagtcttttgtgagttcatggacttttaccaaacctgctatcctgttcctgacgaggggtggttctcaaaggatcaaaagagatggcttgaggtcgtcttttcaggcaaagcaccgcgaggatggactactaaacgtagtttattctggcgttcaatcttctacgcattcggctag

SEQ ID NO: 1435 - DNA, 1572 bp, Cladosporium cladosporioides partitivirus 2
  source 1..1572: mol_type = other DNA
atgtctttcgacgacattgataacgatgacactttcggcgaagagaatcccatcgtctgggactatccacttcggtatgcgacagagacacgtcgttaccctgattacaagcgtggaatcttacgccaaacgcaacgctacgatccatacgtagacgtcgcactgaaatcttttgatcctgaacttcgtgagaggattaaaggctacactcgtactcctggagatgaatacgatttacacggaaaatttctcaaatacgatcgagcacccttgctctttcccacttccgatgatcgtttcactgcaagctacaagctcgcactccaacagacaatgaaggagttcaaactcgatgcgcctatcattcctcactggattaaggatgttgacttagttaagtcaacctcttctggataccctcactttcaacgaaaaggtgacattctagaccaaattcttcaagaagggcgatttcactttcatcacctcaagctctacgatttacatcggtgcccgcttttaccttgcactatgtctactcgtggtggactgtctgaacagactagtccaaagactcggcttgtgtggatgtaccccgccgccatgactgcttgcgaagcagtgttcgctcaacctctgatagacaaactttactctcagaaggctgatctgttcttgactggcgtcgattctaaattccggattcaaaaatatctgtccttgctctctgacgagaaggatactgccggagtcggacttgacttcaagtctttcgatacactgcgttccaacttcatcatccgtgatgcttttgctgtacttaagcaaaacatcaaatttggctactattacgacaagatcactggtacccaacgaggacgttctggagtagctgaacgtacggagaaagcatttgacaatattgttgaatattttattcacacaccaatgctttttccaaatggtcgctgtgttaccaaacacactggcgtaccatcaggttcacacttcacgaacctaattgactcaatcatcaatcgcattctcatcaagaccttcgggttttacgagatgctcaacatccgttccttacggaccaatggagatgactctgcttttacaatgttagaagagcgcactactggtgtgcttcacaaggcagctgttttctttgacaagtttttcaagatgactgtttcggtcgacaaatcatgcgttgctatggcaccatccgaaatgcatgtttcaggaacaacctggagggctctgaagcctactcgaccaaccgacgaatggtttatgcttgctgcatattccgagacctacattcaatcaccgtttgattcttttcaacggttgttaggattggggatagccggaggatttcaagatgcgcactttgtgcaattcttttcctattttcaatcaggctacgattgccgtaacggcccaaacctgctcaactggaagaaacttcgatggctcgaatttgctttcaacataaccgatttgccgaacgtgtataagcaaggctcaaaaactgctttacgccttcgcatcctcgccgcttag

SEQ ID NO: 1436 - DNA, 1620 bp, Cladosporium ramotenellum partitivirus 1
  source 1..1620: mol_type = other DNA
atggaagatttcactcaagaaccaaccaatcactacgtcctaggaaaggggtctcatttagttgacgcactccacctccgtcctgcaaagacggggtcaaccacttccgaggatgtaatccctcttcaattcgaggaccccaacttacgtgaaatcgctaagtatggggggtactcaacctacagctctaactctaacaccgatcctcaggttagagagagtctaaagttattctcccgagacatctacgaggacatccgtggtttcactcgccgcccacaaggaaacgtgggtatgtacacttcactaatgaagtttgctggtgagaaaaacacattctccagtctctctccatctcaacaagcctcgatgcgccgttctatcggcaaagcgaaaaaggcattcaagttgccatacaagcgtgaaccgcttgattggcatgaggtaggtcagttcctcaggcgtgacacgtctgcaggatcaactttcatgggcgccaagaaaggcgattgcatggaagagatttaccacgaagcaagatggttaggacacagaatgaaacaggatggtagatctagtttcaacccatcgaagatgcggttccctccgtgtcttgcaggccagcgtggcggcatgtcagagattgaccagccgaaaacgcgcctggtttgggtattcccagcagaggtgttgactatcgaaggtttctacgctcctttgatgtatcgtgactttatgaacgatcccaactcacctatgctaaatggaaaaagtgcgcagcgcctttataccgaatggtgctgcaaactaagggaaggggagacactatatggcatcgacttttcgtcttttgacacaaaagtaccagcgtggctgattcgtgtggcgtttgatattctcagacagaatgtcaacttcgaaacattcgaaggaaaacctgttgacaaggttgacgcacagaaatggcgaaacgtatgggatggcatggtgtggtatttcattaacactcccattcttatgcctgacggacgcatgttccgtaaatacaggggtgtaccttccggatcttggtggacgcagatgatcgactcagtagtgaaccacatacttatcgattatctggcagactgccaggaagtagagatccgaaacctgaaggttctgggcgacgacagtgcgttcagaggcaacaaccagttcgacctggaagttgcaaaaatagattgcttgccaactggcatgatcatcaagcctgagaagtgcgaaaggacactgaatccatcagagttcaaacttctcggtactagatatcgtgatggtcacgtgtatcgtgacaccagtgagtggttcaagctagcactctatcctgagtccagcgtgtatacgttggatatctcattcaccagattggtgggcctgtggctaggtggcgcgatgtgggataaagtcttttgtgaattcatggacttctatcaaacaagctatcctgtacctgaggaggggtggttctccaaagatcagaaacgatggctcgaggttatctattcaggcaaagcccccagaggctggactacgaaacgtagtctattctggcgttcaatcttctatgcgtatggctag

SEQ ID NO: 1437 - DNA, 1737 bp, Clohesyomyces aquaticus partitivirus 1
  source 1..1737: mol_type = other DNA
atgtgtctacaacaacccacaaacttgatccgacttggacgttttccgttcaatcgtcgtactcgacgtttacttggtcaccacacccgtgtgtctcctcgtgaacaaaagttcgtctctggtgttatcaaaagaggaatctactctaactgtaaccctgacctcgcccacaaggcaatcaatggctaccgccgttcagcgactaaccctgaatctggtgaacaagattttctcaaaactgatctcccgtatcatgacgttcctcgagattttcattatttacgtgcgctccgcgtagttgaaaagatgttccgcccttctagacgtttgaagcctatcgcttttcctgatctaagatactatccctggacaatctcaacagcagcagaagccccgttcactgaaagcaagtactggcaagaatatgtaagacagaaagcccgcgaaggtgacatcgattctgatcgaatgtcattccacaacttatatgatgagatttttcatgtcaatcgacaactcatccatgacataaagtatggaagaaaacctttctggacctcctctggtaaacctgtaccctacgagtttacatacttacactctcgctctcacatggttaaacatgacaagcccgacaagattcgagccgtcttcggagttcctaaactcctcttgatggcagagaatatgtttatctggaatatccagaaagactatctcaatcgacccgctggctcgtctcctcttctatggggatttgaaaccattcgtggtggatggatgaagcttatcaccaagctcaattccaaatcgtttaaaactcttctttctgccgactggagtggctttgatcacaaagctcttcatgaagtaattgatgacgttcatactatttggcgttcttggttcgactttgattctggttacgaaccctcaaaaagcaacacccatgactataccgacactaaatcacgcgaagaacagattgaaagactctggacctggatgtgccacgcaattaagcacacaccaattaaggcagaatctggcaacatgtatcaatggcaatggaacggaatcgcttccggtttccaacaaactcagctacttgattcgtttgttaatgcgatctatcttctcaccagcttatccgcttgtggagtcaacattgagtcgaaagactttcaagcctattttcaaggcgatgactctatcactgcgttccccgaacactcggatttcaagctcctcgtgaaacaactaaccctcgaagcaaaacggcgtttcaatgccgacttgtctactgacaagactacaattggaccttggttcaatgatgtagaagtgctttcatatggtaataagtctggactcgctacccgtgacccagctgagctactcgctcacctactctaccccgaaaggccccgtcgacctggcgaagctgcagccgccgctgctggtatcgctcaagccgcaatgggacattcccgagaagtgtacaacacttgtctcgatgtctacacctttttggttaagacgttaggaattgaaccgcaatggaaagagcacgatccgaacaagatcacaccctattcaatgcatgttcaagaatttccatcgttcgaagatacttttcttcagaacttcgacatccgtcgaaggaccgattctgacaacaacagactctggcctactaagcctactggcaatggattttatttcctcaacaactga

SEQ ID NO: 1438 - DNA, 1575 bp, Colletotrichum associated partitivirus 1
  source 1..1575: mol_type = other DNA
atggaccccgttcatgatctccctagcgatgatttctctgatagagacagtcccatcatctgggaactccccttccggcacatcaccgatgtgaagtggcttccggcccacagaagaggcgtgctccgtcagacacaacgctacgatccatacgtggatgtagcactgaaaaccttcgatcccgagttacgcgagagaatcaaaggattcactcgttcgcctggtggcgagtatgaacttttcggcaagctccgaaaatacgataccactcccctacctctcaaatttgcgaacaaacgtttccgactcgcctattctcaagctctttccgaaactatgaaagagttgaagctcgacgctccggtcgtgcctcactggatcttagatgtcgatttagttcgatcaacctcctccggctttcctcattaccaacgcaaaggtgatatcatggataccatacgccaagaaggtcgttttcaaatgcatcacatgaagttattcgacatgtggcgatgcccgctccttccctgttcaatcgggacaagaggtggcttggcagaagctcatgatccgaagacaagactagtgtggatgtatcccgcggcaatgactgccacagaagctgttttcgctcaacctctgatagacaagctctattctgagaaagccgattactttctgactggcgtcgactcaaagtttcgaatccaaaagttcctctccctgctctccgacgaaaaggacaaatgtggagttggccttgacttcaagtcattcgatactttccgctgcaaccaattgatacgcgacgcgttctctgtactcaagcagaacgtcaaatttggttattactatgatcgcatcaccggcgtccagcaaggacgttctggtgtggctgaacgtgctgaaaagtgcttcgacaacatcgttgaatattttattcacacacccatgatcctcccaaacggtcgtgttgtgtccaaacatgttggcgttccatctggttcacacttcaccaacctcatcgactctatcgttaaccgaatcctgataaaaacattcggcttctacgaaggtctccgtctttccaagctctcaaccaacggcgatgactccgctttctacttaccgtctgatgaaatcagtggtattctcgaaaaggcagcgaagttcttcgactacttctttggaatgacaatttcagtgtccaaatcctgtgtggctgcacaaccgtcagacatgcacgtttccggcaccacttgggctgcactccgcccattccgcaacacagatgaatggttcatgttagctgcgtactcagatacgtacattcgtgctcctttcgactcgttccaacggctacttggccttggcatagcaggcggcttctccgataggaagtttgtttcattcttttcctatttccagtctggctatgactgcaaacacggccccaatttacttaattggaataagcttcgatggctcgaacacgcttttaacgtgaccgatctaccattgatctacaaacaaggcgccaagtctaccatgcgccttcgtcttctcgttttctaa

SEQ ID NO: 1439 - DNA, 1827 bp, Colletotrichum associated partitivirus 2
  source 1..1827: mol_type = other DNA
atgaagaatcttaactttctccgtaccctggagatctctttcttcggttctcacgttcgtgagaaattcgccgaataccaaccgtttcgacttgactggttagtcaaccgagctaaacggttcttcagcgaagaagaagtagagaaagcgctgtcaaacagacgctccgaacacaatgaagaagcattgatcaaagactttatgtctttcgagcaaccttatcatcctattccaaaggatagccattacaaaaaggcagttgcacgtgtcactgaactcttcgaccccggacgcccgttacatccgatttcatttccggatctgcgctactacccctggaaacttaagcctaacgctgaagcaccctggaatataccagacttcacgttcacgccgacatttcgagacctcgatgacgaatccgaaaccccaaagttagaggaacacctctcacgtctatccaactggatatccgaccgtgtcgttaccgtccgtcagtatctcaacaccaagtacttaattggtatgatcgacaaccagtttcccaagtttcacaacttgtacaacgagatttttcaatacaatcgtactcttgttcaccaaatcaaagaaggacacccagccttctggaagaacggcatacccagaacttacttctggacaacattacatgcacgttcacacgtcgtaggaaaagacgagcctgacaaaatcagagcagtctttggcgttactaagctattgctgatgatcgaaaacatgttcatctggccgcttcaagccacctacctcaacgacccagacaaaggcagactcctttggggacgagagatgatccgtggtggatggaaaaagcttcacgctgagatccatgagaatggcaaaccaaatacatttctatcactagattggtcacaatttgacaaacgacttctgttcgagttaatcgacgatgtccaccaaatctggagaacgtattttgacttctcacgttaccagcctacctccttctacccgaatgcaaaccctcgcgacgttcgtcgtctcgagagactttggcaatggatgtgttattcaattaaacacacaccgatccgacttccaaacaatcaactttggagctggaattacaacggtttttcatctggttttcaacaaactcagttgatggactcgttcgccaacatgattatgatactcacttcactatcttctcttggaattaacattaatcacaagagcttctggatacgtgtacaaggtgatgattcattgatcgcattctatgaacagatctatctgatctacggaccaacatttctaacacaacttggagacgctgcaatgcactactttaacgctaaacttagcgtaaagaagtctcaactgcacaacagcctaaacggcatgtcagtactcagctttttcaatgactttggacttccttatcgtacagatgaagacttgcttcggcatctcttctttcctgaacgaaaccaggatctagcccgaaccgcatctgcggcacttggactagcctacgccgctagcggctgtagtcctagatttcacaaattatgtgaatatatctggactaaactggtcaaggaaaaaggtttctcacccaatgaggaatctatccaatggttagaacgcgccggtgtatttaccgaacttgatgtgaaagcaatgctttccgaagcctttccacaacagctggaacttcgagctcaagtatggtaccacacaccccggtcagttcaagaaagagaacggctatggccaacgcaacctggaactcgcggaagatttttcttcctaccctag

SEQ ID NO: 1440 - DNA, 1722 bp, Colletotrichum eremochloae partitivirus 1
  source 1..1722: mol_type = other DNA
atgtcaagacttcggtttctccggcgagtttctcgctttccggctcgaaacgaaacctacttcgacccatttgctcacgcggctctcaacgcggtctccggacctgacgtaagagagtacatctcagatatcaaagagacatggcatagaccctccggggatgatgctgtcttagagaagaacttgatggactacggtgacaccttaccaaggaggtcattcgatggtgcctaccttgcaattctcaagaagactctcgacgaactgcgacctgctgagccaatcatacctctcaccctaggtgctgctgccaagcatcctcaaatgccgcactccacctcccctggttttccctggactaccaaaggctatcgcactaagcgagatgtcttccaggacaagtcagctatgggactcatccacagggcttgggattcaatcggtcgtggtattgcctggcagcttccagactgtctaggcttccataggactgtggcttctactcgcgacaagagtaaaatccgtcctgtttggggttttccaactgatgttatagttgaggaagctcgatttttcttccctcttatggaggaactcaagcttatcaacaatgagcgcgacacgttctacggtaccggcatggagacaatgctgtcagggcatcaacacctggctcgcaatcttacaacagcctccgttaagtacgttctcaattcggatctatcgcgattcgatgctcatgtgccatcctgggtcattcgtgacgtgttcgcccacatttcatcgtggttcgatttcacacgtgtacgcgactcagaagggaaaatatggaactgcaatccaagtcagacttgccgtcgctggaaagcaatggtgtcttatttcataaacaccaaggttcgtatgccatccggtcttcgttttcagaagaaccagggcgtgccttccggttccatgttcaccaatctcatcgacacttgtgtaaacgcggttcagttcagaactgctctttaccattgtactggttctttgcctccaaaggactattactatggtgacgactcctgtatcttcctccgggaagttccagacctggacgctatcgcaaaacaccttctcgaacacttcggtgccgagttgaatgtcgacaagacaatcctgacggataaccctgacaatattcattggctgggatacttcttccgttccacaggaccgagacgatctttcgattttatcgtcgcctcgacacttttccctgaccgcgaaattgagtcaccgaccgattccgcagctcgtttgcttgggcaactatactcttgtatggaccccaaggctgccgtcgtcttctacgacgcagtaacctggctccagagtacgtacgatatctccgttacggagttgaactcttacgtcgcttctctgccttcaaaggctatgaagtatcttactactcttggtctctcgatagaagaggttaccttaccctccgtctccgttgacccttttgggggacgtgtcgtgaccgacattctaccacggccttgtgcccggaacttctttaggtttcgagaccctcatctgccaaagtacgccttttgtgcagaagcctatcagaacagagcactacggcaacccatctttcgtgatttcgacaagtattcacaaacattcacgcaacacttcgattacgaactagatgcagcctacttcacggattag

SEQ ID NO: 1441 - DNA, 1578 bp, Colletotrichum gloeosporioides partitivirus 1
  source 1..1578: mol_type = other DNA
atggaccccgttcatgatctgcctagcgatgatacctctgtcgaagacaacgccaaactcatttggacactcccgtttcggtacatcaccgatgtaaagtggttaccaaaccacaaacgtggcatacttcgccagacacaacgctacgatccgtatgttgacgtagcactgaaaactttcgaccctgatctccgcgagagaatcaaaggttacactcgttcgcctggaggcgagtacgaactgtttggaaaactttccaaatatgacacggctcccttaccactcaagttgtcgaataagcgtttccgactcgcgtatgctcaagcactgagcgagacaatgtcagagttgaaactcgacgctcccgtcgttcctcattggattcttgatgtagatttggtcaaatccacctcgtccggttacccccattaccaacgcaaaggtgacatctataatcaaattctcaaagaaggtcgttttcaaatgcatcacatgaagttgtacgacatgtggcgatgcccgcttctcccttgttctattggaacacgcggcggtttgtcagaagcccatgatcccaagactcgacttgtgtggatgtatcccgcagccatgactgccactgaggccgtcttcgctcagccactcatcgacaagatgtactctgagaagaaagacttcttcctcactggagtcgactccaagttccgcattcaacgcttcctttctctactctctgatgagaaagacaagtgcggtgttggtcttgactttaagtcatttgacactttccgctgcaaccaactgattcgcgacgcgttctctgtacttaagcagaacgtcaagtttggttattattatgatcgcgttaccggcgtccaacacggacgttcaggtgtggcctcacgcgctgaaaagtgcttcgacaacatagtcgagtacttcattcacactcccatggttctcccaaatggtcgagttgtgtctaaacacgtaggcgtaccctctggctcacacttcaccaacctcatcgattccatcgtcaatcgcattcttatcaagacgtttggcttctatgaaggacttcggctttccaagctcgccaccaacggcgatgactccgctttctatctgccttccgacgagatagacgctatactcgaaagagcagcgaaattctttttggagttctttggaatggtcgtttcagtgtcgaaatcatgcgtagcatcttcaccctcgagtatgcacgtttccggcaccacttgggctgcactccgccctttccgaaccacagatgaatggtttatgttggcagcgtacgctgacacctacattcgagcaccattcgattcgttccaacgcctactcggtcttggcattgctggtggcttttcggattctaaattcgttcgcttcttccagtacttccagtccggttacgattgtaagcacggtccgaacctccttaattggagtaaactacgatggcttgaacacgccttcaacataaccgatttgcctttggtatataagcaaggctcaaagtccgttatgcgccttcgccttctggttttctaa

SEQ ID NO: 1442 - DNA, 1716 bp, Colletotrichum liriopes partitivirus 1
  source 1..1716: mol_type = other DNA
atgccgttgaaaattctacgcaacgttgctcgcttcactgctcgcagtgagagacaacacgatacattcgctcgcgaagcgttgatggcgacagcttctgctcgcactctcgctttcgttacgaaagtctctcaagagtggcaccgaccctccggggatcacgcccttcttgaagatagcctgtcaaagtacgactgcaacctcccaaaaagatgtgtttctggcgattacttggctattttgaagaaaactctcgatgaacttcgacccgacgaacgaatcataccacttaccactggtgcttcagctaagcatccgaacttcccgacaaccacgtcacccgggtttccctgggttacgcaaggctttgccaccaaaggagaagttatcggaagcgccgctgccatgggacacatacaccgcatctgggatagtatcggccgtggaattccttggtcactcccggactcgctcacctaccagagagtaattgctagtcctgcggagagaacgaaggtacgccccgtctggggttaccctgtcgaagtcattgttgaggaaggtagattcttctacccactcatcgacgcactaaacaagctgtgcaatgacgacgacgcgttctatggacttggaatggagacgatgcgctctggacactctcacctgtctagatcatttgatcctacaagcacaagattatccttgtccgctgacctttctaactttgatgcgcgtgtaaccgactggattatcagagacgttttcgctctgctatccgactggttcgactttacaaaagtccgagattctgagggaaagatttggaatgtcaaacctgaacaaacatgccgcagatggaaagccatggtgtcctattttattaacaccaaggttcgcaccccgactggaaagcgatttcaaaagtcagctggtgtaccatccggatctatgttcactaacgtcatggacactatcgtcaatgccgtacagatgcgcacatgcatacgaagagtcactgggcacttgcctgccaaggactactacttcggtgatgattcgcagatgtttttggacaccgatatcaaccttgacgctctagctaaggagttgctccttacgtttggcgccatcctttcagtcgaaaagacaatcctgtctgataaccccgacaacatacattggttgggatattttcacagatcgactggacctcggagagaccttgctttcatcgtcgcctccaccctctaccccgaacgccctgtagacgcacccatcgaatcctgcgcccgcatgctcggtcaactctattctgtcatggaccctaaggcagctgttatcttctacgatgcagttcgctggctccaacagaagtactccataagtactgttgacctggataagtacgtcgagagcctgtcccctcgagctctacgctacttggtcacacttggaatggcacagtcagaagtcaaacttcctgactgcttcaccgatccatttggcggccgctacatccccgctgttctaccacgcccttcaccgagaaagtttcgttctcgtcgcgatcgtaatcttccagattacgcgttcatccctgaggcgtactcgaatccacacctaagacaagacggttttcacgacttcaatatattcacagaaataaacccttcttgcgacttggaattcgaaagatcctacttctccgattaa

SEQ ID NO: 1443 - DNA, 1620 bp, Colletotrichum truncatum partitivirus 1
  source 1..1620: mol_type = other DNA
atggaagattttactcaagatccaacccaacactacgtcctagctaaggggtctcatttaattgacgcactccacctccggcctgcaaagccggggtcaaccactagcgaagacgttctttcttccgactttgagtcgccaaatctgagagaaatcgcaaagtatggcgggtactcaacctactcgtctaactctaatactgatccgtggattagagagacgttaaagatacacgatcgagaaacttacgaacaaatctggggttacacccgtcgaccgcaaggcacacctggcatgtacactgcattaggaaagtttgcgggagagaagaatgtgttcggagacctttcgtcaagccaacaatcttcgatgcgccgggcaatcggcaaagcgaagaaggcattcaagcttccttacaaacgggagcccctcgactggcacgaagtcgggcagttcttgcggcgtgatacgtccgctggttctacctttatgggccagaagaagggtgacgtgatggaggaaatctatcatgaagccaggtggttaggtcatcgaatgaaacaagatggaaaacgaagtttcgatccaaccaggatgaggttccctccttgcctggcaggtcagcgtggcggaatgtccgagcgtgacgatccgaaaacgcgacttgtgtggatttaccctgcagagatgttggtggtggagggtttctacgcccccctaatgtatcgggactttatgaacgatcgcaatagcccaatgttgaacgggaagagtgcgcagcgtctgtacaccgaatggtgctgcaatctaagggaaggggaaacactatatggcattgactttagcgcctttgacacgaaagtacccgcgtggctaattcgagccgctttctccatcctcagacagaacgtaaactttgaaacttttcaaggtaagcctgttgagaaagaagaagctcagaagtggcggaacgtgtgggatgccatggtgtggtattttattaatacacccattcttatgcctgacgggcggatgttccgcaagttcaggggtgtgccttccggatcctggtggacgcagatgattgattcagttgttaactacatcttaatcgagtatcttgcggattgtcaaaaggtagagatccgaaacctgagggtattgggagacgatagtgcgttcagatctggagaccagttcagtctcgagtcagccaagatcgactgcattccaacggggatgataattaagcctgagaaatgtgagaggaccaaggatccttctgacttcaagttacttggcacaaagtatcatgacttacatccgttccgtgatacggaagagtggttcaagctcgcactgtatcccgagtctagcgtgcatacgttagatatttcttttactaggctgatcggcctgtggttaggtggtgccatgtgggataggaagttctgtgaattcatggacttcttccaaactagttatccgtgtcctgaggaggggtggttctccaaagatcagaaacggtggctagaggtcatctattcaggcaaagcgccaagaggttggactaccaagaagagtctcttttggcgatcaatcttctatacttatggatag

SEQ ID NO: 1444 - DNA, 1440 bp, Costanza partiti-like virus
  source 1..1440: mol_type = other DNA
atgcctctacgctatattggacgtactaccggatttccgtcacgaacctatgatgagatatatcccagcgaatttgtactgccttttctggataccattcctagcaagcgtcgatcccccgtcacacagaagctaattattgacgatcttaaacaattttctaatgtgactgagagaccggacgaccctttgcttgatttggctattgcccacacgactaggaagtttatgctgcctgcccctgtaaggatgaaacacttaaatgatgttttcaaggttgaaagtgacatatggaccaagagcccaggtctaccgtggactcgatacggcgttagaaccaaaggacagataagagatgatcctgcacgaatacgagacgtaagaaagttttggcactacgttaaagccggtgaaaaacaaacatttccggattgctgcgcttttgtccgttcacatatatgtgagcaagatgactttaaggtgagagccgtctggggttaccccgccaccgtcacttttggtgaagctgtttttgctatgccccttattaaaggatatcaacgattaccggttgataatacgcccatagcatatggacttgaaacagcaactggtggaatgaaaaagctgaagacccgctttgcaaaagttggacttcattatgccggattagacttttccaaatttgataagaccgtaccagcttggcttatccgcaccgcatttgatatcttgcgatgcaacatcgactttacgtattatgaggaccatggagttgccgatgcccgtaggatgattgtcatgtacgagcgaattgtggactattttattaacacaactgtccagactgcacgtggcctccggtttagaaaggatagtggtatagcgagtgggagctatttcacccaattagttggatcgatcgtcaattgcatacttttatattatgcgtcactatcgacaattggccgtatgccttttgatagtgttttcctgggtgatgattcattcctatcgactagtataccattgtcgatttcggatgtgtctatgtgtctctcgaaatttggagtcgagataaacatgaggaaatcacagatttcccaatccatagacgagatgcgctttcttggctattgcatcaatcacgctattcctttcaaacctgccgatgacttactttcctctcttatattccctgagcaccctgatgattcatgggacgccgctgcctctagagctttaggtatatactacgctaatttcggcgttaacagggacgtgtcagagatatgctggaagatggtaaacatggcggaattcacactcacctttggacggggcttcgaacgtatgcttaagcatattggttacaaggagctggatatcaatttacccgttccagttgaattcctccgccgcctctctgttttctgttag

SEQ ID NO: 1445 - DNA, 1434 bp, Cucumis melo cryptic virus
  source 1..1434: mol_type = other DNA
atgcttagagatttaacagactatacatttcttgagttctcttctgaattcgagactttgtctgatacacatcctcatattattcggcgagaagctgaacaaatactgaaggatgagttcgcattgagcgaactaaaccaagcatggccattgctgtatgaccagaaacttaagggttgggcacgaagcttttacactttagaaggtcacatgcaagcaatacatgcttattctaatccagatacacctatctcttctttaaaccagactacatatcgagcaacgattgacagtcttaagaatgagttaagtagccttccaaaagcgaaggcatttgatgtcttgactgagctagacaagataccttacgaacagtcctccgctgcaggctacaactacataggtccaaaaggtccattgtatggtgtaaaccacaagagagcaatccgcaacgcattagctactctttggtcagcgattagagacgacgacggtggtccagcttatgtcattaggaacatggttccagacgttggatacactcgcactcaattgaccgatcttcgagagaagacgaaagttcgtggagtatggggtagagcatttcactacattctacttgaaggcacagcagcgcgccctctactagaaacgtttatagcaaatgatacattctaccatataggagacgatccgcaattgagcgtacccagattactgtcacatgtcagttctgaatgccgatggctttacgcagtcgattggtctgcatttgatgcaaccgtaagtcgattcgaaattgaagcagccttcgatgtcatgagagatttgattatctttccgaacttcgaaacgcgacaagcatttgaattaagcagattactcttcactcacaagaagattgctgctcctgacggacgtatatattggatacataaaggaataccatccggtagctattatacatcaatggtcggttcaattattaaccgtttacgcattggatatttatggcgcacgatgttcaaccgagaaccgaagatgtgcttcacccaaggtgacgactctttgattggagacgacgaactagtcgacccggttacgttagcggctttagcaagccagctcaactggaacattaacccaaacaaaacggagcattctcgcacaccagaattcgtttcattcttaggaagaacttccaaaggtggatttaattctagagagctagaaaagtgtttaagattactaatctttccagagcaccctgttttgacgggacggatttccgcatatcgagcaagatcaattaacgaagatagtggcttcacaagcaactacattcaaacgatcgctcgtagactgagaagacgatatggcatcgctgaggaatcagaggtaccaagattgttacaacgttacattccacaataa

SEQ ID NO: 1446 - DNA, 1500 bp, Culex pseudovishnui partitivirus
  source 1..1500: mol_type = other DNA
atgcaaagaacgttcaaacgttcagaaatggatagaccaaccttcaattcccttgaattcgttcagcgcgtgaagcctcatcgcatccgccgtgaaccatggttagtagatccgttcgttaaggagtgtctcgaagagatgctcgacaccacagcagtagaggcatttggaagatacaccagatcctactacacagaagagggccattacgcgaacctctggaaatacgattcgccgtatatctccaggcctaatgacccaatatttgaccgcgcaatcgaaatcgcagcacaaaaagttgccctcgatcccaagccggaaacccacaactggaacaaccttgcttcagtaccattcatcgcaggatcatctgcaggatggggttacatcggcaagaaaggatcacctggcaatcatgcactcgcaatttcgcgagccaacgcctacctcttatggtggcgcgatatgcgcaacggtatttcgcaaaaggaatacctctaccacccggatctcgcgtggacccgtacccaactaagcgatatggagtccccgaaaatccgtcacgtttggggaaagaccttcgaaaacatcatactagaaggaataaccgcagctcccctcatagatgcctaccgtgcatcagattcacccattgtagtgggcataaacacctttcgacgcttaccgctaataatcgcaaaagcgtgttccggatcaccaaacaatccagtcccccaatatggaattgggatagacttcaaatcattcgactcctcaccgcaagaatggcttatcaacatcgccttcgacatcctcgaacagaacatcaccttcactggcgaaatggaaaagttaagtttcgaatactcaaagtattacttcactcacacaccagttgttatgccagatggccgcctatggcggaaacatcaaggtataccctccggtagctacttcacacagctaatcggctcgatcgtcaacctcatcatcacatcgtacatccaactcaagttgtacaaccgaacgttcgatacatgggttcttggagatgattcattatttggaatccctgtggatctaggccgtcccgacttaaacgccatggccagattagttagcccgctcggcttcacaattcacccagacaagtgtacagtgacacgctcccctcgagaactagagtttctcggtcactgcgcgcgtggatctagagttgaacgagaagacgctcggctaatgcgcatggtactgtacccggaattcccggttactggacccgccatgtcaatgtcccgcatcctaggcgccatgattggatcagcaatgaactcctggcccattctgcatctctacgattacatgaaggctcgctaccgcagcctcctccccgcagatttcgcgttcgcccacgatgacaaggactggttagttgcagttgtaggactgccaacccaccaccccctgcttacaccgagtgacgtattcgtcatcacataa

SEQ ID NO: 1447 - DNA, 1676 bp, Culex tritaeniorhynchus partitivirus
  source 1..1676: mol_type = other DNA
accaatgtttctttaaacaagtcccagctttaatggcgttattggatttcaagctaacaccagctgaaacattcgggagagctcacgtctacctaaccgacgtgaagtatcggccccccctaccatttgttagtaagtacggcggatcacccccttctaacataaccatccttccggaggcacacaaaggtttttcttacgacatgtcactgccttacgttgattttaaagcggtccgcgcctgctatgaaggtggcgctgcggatttagctacacgagtattgagaacgacacgacgatcgcacatcacaactgatcacctctacgatagtgtcctgaattatggaagcccttcgcctccccgcgtaacagactctgtctaccaacgctgccttgaagagctgaaggagcagtttgacgttaataccaaactagagcctctttcgcttcgagaagctgctgataagataccacagaatactagccctggattaccctggatccagatgtacccatctgccaagaaaggagaaatcttgagcaagcactttgattcaatagccgacgattggaaagcagtcgagaatggtgctcggaaataccccctgccggattgtgccgcctttggccggtctcacattggaagtgctgagactaacaaagtgcgagcggtttgggttgtaccactcactgttgtagctgctgaagctcggtttgccctgccagttattgacctgttgaccagtcagaccatcggtcacaacaccgcctacgggtgtgagatgatgaaaggtggcatgaaatgggtcaatgaccaagccctatgggccaagaacaaagatcctggagccaagtatctgatgacggattacagtagtttcgacgctaacgtcccagcttggatgatacgagactgttttgctatattacgccaaaagtttaacctgactgccgctgaagcgaacgtattccggaagtgcgtgtcctacttcattaatacccctattcagtttgctgacaagaggaggattttgaagaatcacggagtaccgtccggcagtatgtggacaaacatcattgatacaatggtcaactttcttcaaacccgttactgtatttacacactaacgagagctgcaccgttgtttgatgtttactttggagacgatgggttgattgcactacctggacatgctatcatcaacctagaagatatttccgctaccgctatggaaaagtttggtgccgtagtcaacaccaaaaagagctattggactaatcgcccccgcaacatacacttccttgggtattataatgcaaatggatcctgctataagaaaccggaaggattagttgcctccttcttgtatccacagcacatgcaagatgactgggcatatacccttgcacgtggcctgggcgttctgttggcgtcggcgggagacagaacgatatacaagatagtccgacaagcgtacatcatggcgaggcgagttgatggagccgtagagaagggatttgagttggtatccactcatccgagaatggttaggcatttgcgccagatgggcgccgaggttgacaacttgtcgacccagttgtttgagagtgctgaaatgtcaatacccgcggagaactgtaggaagctggagctgaacataatgctggtcaagtag

SEQ ID NO: 1448 - DNA, 1791 bp, Curvularia lunata partitivirus 1
  source 1..1791: mol_type = other DNA
atgttaaacaacctcatccttggtgttaaacgcagtttagctaaggctattcgcggcaatactcaagacaatcatgtcattgaggcttaccaccacgttgttgaccacgccctccgtcgcttcttacctcacaatgaggtcgaagagatcattcacggttaccgccgatccgaatggaatgaagacgctttaaatagagacattgacaaactcaattctcaagagcatgaagttctaaaagacgaacactattggaaagcaatccaaaaagttcaatctatcttcacgcctgaacgcctccttcaacccatccattttgctgatctacgtctgtacccttggaaactctcgaccagtattggagcaccctttgctacaagcaaggaatggaactcgtacgtcgttgataaatatcacggctatcaaaatggttttgatgaagataccttcctcaaacactatcatcgagatctattcgctgaagcccattacggacaaagccttgatccccctatgatcgacgctcgcatgtcaaaacgcaatctctacaatgaaatgtttttcatcaatcgcaaacacatccacatgatcaaagatggacgcaaaaccaatgattctggacacgatcttcgctactggcatactgcctttgcaagacaacatctagtcaaatctgacgaagatgacaaagtacgtctagtttttggagcaccatcaactctcctcatggctgaacttatgttcatatggcctattcaaacctggctcctttctctaaaggaacagtctccccttctttggccttttgttactttaaccggtggctggcatcgcctagtcaactgttttcaaaagtacattcctgcctatggattgatcgctacagtggattggagtggttttgatcgctatgctcgacatactgtgatccgagatttacaatcttgtgttctcagacctatgttcgatttttcgcatggttatcaccctacccagaactatcctgacactcaggacacagatccccaacgcctagaaaacctatggaattggatgtgtgactcagttctcaccaccccacttatgctcgccgatggtacacttatacagttccgacattctggaattttttctggaatatttcaaactcaactgttagacaccatctacagtcttcaaatgcaattcactattctatcaagaatgggttttgacttggataacgtcctcgtcaaagcacaaggtgacgattcaatcaccgccatagtttgttcatatttaatgacagcacactggttccttaccatgtttgttcattacgcaacaatctattttggcgctatcgtcaaccacaagaaaaccgaggtactacctaccttggagcatgctgaagtcctgcgctaccgcaatcgcggcggcattccttacaggaatcgtattgagctactcgctcaactccggcaccccgaacgagccataacttatcaagcactcatggctagaaccgttggtatcgcttacgcgaactgcggctctgaccccctggtttaccagatatgtgaagacatccaccaatatctgtcaaagctaggagtcaagcctgaccctgctggcctgccctcaggtgtacgtttcgtacaggattatcttcctggacaaacggccatcaatgtgcagcgcttcccgacatacttcgaaactgtctctcgtctccttgacggatacgaagaacagccctccgaaggatattggccccgctctcacttcatcggtatccccggtcgaatttga

SEQ ID NO: 1449 - DNA, 1791 bp, Curvularia lunata partitivirus 1
  source 1..1791: mol_type = other DNA
atgttaaacaacctcatccttggtgttaaacgcagtttagctaaggctattcgcggcaatactcaagacaatcatgtcattgaggcttaccaccacgttgttgaccacgccctccgtcgcttcctacctcacaatgaggtcgaagagatcattcacggttaccgccgatccgaatggaatgaagacgctttaaatagagacattgataaactcaattctcaagagcatgaagttctaaaagacgaacactattggaaagcaatccaaaaagttcaatctaccttcacgcctgaacgcctccttcaacccatccattttgctgatctacgtctgtacccttggaaactctcgaccagtattggagcaccctttgctacaagcaaggaatggaactcgtacgtcgttgataaatatcacggctatcaaaatggttttgatgaagataccttcctcaaacactatcatcgagatctattcgctgaagcccattacggacaaagccttgatccccctatgatcgacgctcgcatgtcaaaacgcaatctctacaatgaaatgtttttcatcaatcgcaaacacatccacatgatcaaagatggacgcaaaaccaatgattctggacacgatcttcgctactggcatactgcctttgcaagacaacatctagtcaaatctgacgaagatgacaaagtacgtctagtttttggagcaccatcaactctcctcatggctgaacttatgttcatatggcctattcaaacctggctcctttctctaaaggaacagtctccccttctttggccttttgttactttaaccggtggctggcatcgcctagtcaactgttttcaaaagtacattcctgcctatggattgatcgctacagtggattggagtggttttgatcgctatgctcgacatactgtgatccgagatttacaatcttgtgttctcagacctatgttcgatttttcgcatggttatcaccctacccagaactatcctgatactcaggacacagatccccaacgcctagaaaacctatggaattggatgtgtgactcagttctcaccaccccacttatgctcgccgatggtacacttatacagttccaacattctggaattttctctggaatatttcaaactcaactgttagacaccatctacagtcttcaaatgcaattcaccattctatcaagaatgggttttgacttggataacgtccttgtcaaagcacaaggtgacgattcaatcaccgccatagtttgttcatatttaatgacagcacactggttccttaccatgtttgttcattacgcaacaatctattttggcgctatcgtcaaccacaagaaaaccgaggtactacctaccttggagcatgctgaagtcttgcgctaccgcaatcgcggcggcattccttacaggaatcgtattgagctactcgctcaactccggcaccccgaacgagccataacttatcaagcactcatggctagaaccgttggtatcgcttacgcgaactgcggctctgaccccctggtttaccagatatgtgaagacatccaccaatatctgtcaaagctaggagtcaagcctgaccctgctggcctgccctcaggtgtacgtttcgtacaggattatcttcctggacaaacggccatcaatgtgcagcgcttcccgacatacttcgaaactgtctctcgtctccttgacggatacgaagaacagccctccgaaggatattggccccgctctcacttcatcggtatccccggtcgaatttga

SEQ ID NO: 1450 - DNA, 2124 bp, Curvularia lunata partitivirus 2
  source 1..2124: mol_type = other DNA
atggttttctcaacagttagaaattatctatctgaattccgcaatactcaactccaagaatggaaacttttccagaaatttggaaccgttgcccctgaccccaactctgatcacacagatgaagatctccgccgtctcctttcccgagcccgctaccttcctcatgaatccgaattgtcttctgaatatcaacaacactacaaagatacctattatggctatctcgaatcagatcacatgaagaatcaaccgtatgaattttacgaaccgatcaaaattacttcagttcccgctgaccgtcttcccgctcctggtctcactcttcttccgtataagtaccatccccaacaagttgttactgcaaccgacatcgttcccgaaactggattcaagattcatcccctccttgattacctcctcaaccgaaaatacgtcgaataccgtcactacattgacaaatattgtcgaccccttggcacaatcgacgccacattttccgatttcaatcgtgaacaacagcaatacccacaagtccctgctgacctcgtcactcgcatcgtcatagttattatgcacttactcaacgctaaacccttccttcccttacactacgttgacactttctttgcaaaaatgcctctctctactggtgtttcctacttctatcgacattcttatgaacttaagacccacgccgctttctcgcacgatcccaactatcgcgcaaaacaaacttcaaaaggctacatgctcaatgcatttaccgaatgggcccgcacaatcgttcacagaataaaagaatatgcactccccttttcccctgaaaacctctctccttctcaaataaatgataaacttcgcgaatttattctcgaacacgccactcttttgtacactcgaaaccacatttctgagcgtgatggaactcttaaacagagacccgtctacgccatggacacactctttctccaccttgaatgtatggttacttttcctctacacatcatggctcgatctataaaatcctcaattatgtatagtcttgagactatccgtggtggctgcgcctacatggatgccgtctccaaaaactatacctcctttctttgcatcgactggtcttcctttgaccaacgtatgccctggactatagtcgacacattctttacgcatttccttccaactttgcttattatctcacatggttatcaaccaactgctgaatatcttagttaccctggcctcactccagataaaatgtttaaaagaatcttcaacatcatttgttttctccgactttggtactacaactgcgtcttcctcaccgctgatggattcgcttacgtacgccaattcgctggtatcgcttccggaatgctgaatactcaatatttagattcctactgcaacctatttcttatgttacatgctctgtttcattttggttgtactgaagctgaaatcatggaattatccgtctacgtgatgggtgatgataacgttatgctcacacactggtgtgaaaataaactttacaaattcatgatcttctttgaacaacatgcactcactcattttggcatggttatatcaacgaaaaagtccgtattcactgtacttcgcagtagaatcgagatgcttggataccgtattatgtttggaactcccaaacgtgacctcggcaaactcatcgctcaactttgctaccctgaacatggcccgctagacaaatacatgtctgcacgcgccgttggaatagcttgggctgccgccggtatggatccaatgtttcacgaattctgctttgacgtatacgtcacttttctgccttatgcagacaaggaacactcaacaaacttagacaaagtgctcaaacacttgcctggtttcttcaagatccttgatgaccctagtgaattcgttaatcccgaacgcttcccttcgatcgaagaagtacgctatcgctacgcccactggcaaggcgaactcgacccacacaaaaagtggtctcctgcgcacttcatacaagatccggaaaccgttccacccaattctgtcaccatgaaagaatatatgtctgaacacaacatatgctttccagacgttccccgtctgtttacatga

SEQ ID NO: 1451 - DNA, 1217 bp, Cytospora sacchari partitivirus MP-2014
  source 1..1217: mol_type = other DNA
atggaaacaacgcctatcgatccaacacttctcgataacgtcatagaggggtttcattcagttgacgactccactctcgacccttcgtcacggacgagaggagccagctatgatgtgttagagtccaaattccaatctcctggactgagagaaatcgcacggtataatggttacggtgtttattccggccaatccaataccgatgcgtgggtccgaaccacgctcaagcaatttgatcgtgatgtgtacgacgacatttatggttttactcgcaaaccagaaggcgttcctgggatgtataagagcttgaagaagttctctggtgagagtaaagactttcggggattgaaccgagtccagcggacggcaatgcagcacgctattgccaaagctacaaaagcctttcgtctgccaacgaaacgtgagccattagattggcacgaggtgggtcagtacatgcggcgtgacacgtccgcaggcgtaaccttcatgggcaagaagaaaggtgatgtgatggaagacatctatcacgaggctcggtggttaggacaccgaatgaaacaaaatggtcgtggaaaattcaacccggccaagatgcggttccctccgtgtcttgcaggtcagagaggaggtatgtcagatgcctctgatccgaagacaagattagtctgggtgtatcctgctgaaatgttgtgtgtggaaggtttctatgccccagaaatgtatagagccttcatggaggatccaaacacaccgatgttgaacgggaagtcagcgcaacgcttgtacacagagtggtgcgttgggttaagggatggcgaaaaacttgttggtttagacttttctgcattcgataccactgtgccaacgtggttaatacgtgttgcgtttaaaatacttcggcaaaacgttgagtttgatactttccgtggtgagcgcgtgtcgaaacgcgatgctcagaagtggcgtaatgtgtgggatgcgatggtgtactactttatcaacaccccgattctaatgccagacggacgtatgttccggaagttcgggggcgttccctctgggtcatggtggacgcaaatggttgacagtgttgtgaattacatacttgttagctaccttgccgagtgtcagggtgtcaacccacgggcgctacgggttctaggtgatgactcggccttccgcactggcctcgagtttgatctcgaaataacgca

SEQ ID NO: 1452 - DNA, 1419 bp, Dactylorhiza cryptic virus 1
  source 1..1419: mol_type = other DNA
atggagttcactttcaatgactttcaagcagaccttgaagatctacacgaaacacactccgaacgagtaagacgagagtctgaggttacgtattacgatgagtatgcaaagaatgaactactcagttacgaaccccgtttgtatgaacaagttatagaaggctggtcccggagctattactcaggacagaagcatctacaagctatcatgcagtacgctctaccaaacaaatccatcacaatggttgatcaacatgattggaatcaatctgttatcgccgttaagaatgggttacgtagccttccaacagtgagggcgttctcgatcgaatctcaactcgatcaagtatactacatccagtcctcttcagctggctacggttatcaaggtgcaaaagggccactttatcacgataatcacatgcgtgcaataagaagggctaaagctacattgtattcagccattaaaccagacggtgaagggcttgactacgcaattaaggaatccgttcctgatgtaggctatacacgcactcaactagcagatattacgcaaactacaaaagtcagaggagtttggggaagagcattccactacatactactcgaaggcgcgtccgcgagaccacttctcgaagcagctatgtcctcatcaacttttattatggttggtcgtgatcctgttaagacagttccagtattactatcaaatacaagcgctcaatgcagatggttaacagcactcgattggcaaactttcgacgcaacagtaaaccgtttcgaaattgacaccgccttttctatactgaaagaacatctaatctttcctacaaaagatgacgaacaaaacttcgaattctgtaggttgatgtttattcacaagaaaatcgctgcgccagatggtaaaatttactggtctcacaaaggaataccatccggaagttattacacttcacttatcggatcgattgtcaacagacttcgaatcgaatacttatggaggcttaaattcaacagaggaccgcaaatctgttacactttaggtgatgactcacttatcggtgacgatgacttttacagtcccacagaaatagccaacaaagcatccgatcttggctggattctcaatccaaataagactgaatgttcaactataccaggagaagtaacatttctaggaagaacaagcaaaggaaatcttaaccacagagatctgaaacgctgtctccgactactaatacttccagagtatcaagttacatccggatccatttccgcatttcgagctcaatcaatagcagaagacgcaggcaacaccagcgaaattctgaacactatcgctcgaagacttaagcgcaggtatggcatcgctgacgaagcagatgttccaacttatctaagacgttatacatttcaataa

SEQ ID NO: 1453 - DNA, 1449 bp, Dactylorhiza cryptic virus 2
  source 1..1449: mol_type = other DNA
atgtctacagagactatgcacaatttgaatggttatgaattcactggtttcactcacgagcttgaaccaatggactctacacacgttcatcgtatccgacgcgagtcgaatacaacatacagagacgagttcgctgtagcaatactaaaagaactcaatccattactatgggaacaaacgctagaaggatattcaaggagttactactcaatggaagcacacctttccagcatactcaagtatggatcacccaacacacccaacacagcacttaattgcaatgttttcgaacaagcagtcaatgcaaccagaattgggttatgtagccttccactcgtgagggcaatcaacgtactaactgaactagattcagtccgatacaatcagtcctccgctgcaggattcgactacatagggatgaaaggacccccaggtgaatcaaatcacaaacgggccatttcacgtgccaaagccacactatggtcagcaatcgctcttgacggagaaggattagatcatgtcatccggacgcaagtcccagacgttggttacactcgcacgcagctaacgcttctcaaggagaagtttaaagttagaggagtttggggacgagcatttcattacatcttaatggaaggcacctcagcacaacctttgcttgacgcattcaaacgcggccaaactttcttccacatcggagaagacccaacagttagcgtaccagaaatactatctttcacagctaaacactgcggatggttaatgtcattggactggagcagtttcgacgcaacagtcagtcgttttgaaataaacacggcttttgacctaatcaaagatagaattacgtttccaaattttgaaaccgaacaggcttttgaaatcagcaggcaactatttatccacaagaaaatagctacgcccgatggaaacatctactggtcacataaaggtataccttcaggtagttactttaccggcataattggatcaattgtcaaccgactcagagttgagtatatatggagacttcacaaacaacgaggccccaaaattatcttcacccaaggagatgactcacttataggagacgacgactataccgacccgactatgttagcaaagctagcaaagccacttggctggattttgaacccagacaagactgaaacctcaagaatgccagaatatgtcactttcctaggacgaacaacttatggaggattaaacacccgaaaccttaagaaatgtattcgcctattggcatttccggaattccctgtggaatcaggacgtatatcagcgttccgcgctcaatctatagcacatgatgcaggcaacacctctcagctattgaacgacacagcgcgacgtttacgacgaaattacggcgtaccttcactcgatgaagtaccgcactactttaagccatatttaaactttgtttaa

SEQ ID NO: 1454 - DNA, 1323 bp, Dactylorhiza cryptic virus 3
  source 1..1323: mol_type = other DNA
atggatacacgaagcacactaattggttacgatttcactgagttttcacaagacttcgtgcaaacgaaccaacaccatcctcatgtggttcgacgcccacaggcaacgacacacatagatcgatttgctctcgagcaaatcatggatattaacgctgtgtattatgaacaatacctacaaggctggtcaagctattatttaacatcaaggcatcttgaagagattcataaatacaacagcaacaacacatcatttgcagttgttaatcagcatgtctatcgacaagcgattcaatctgctcagaatgggttgcgtagccttccgtttgtgagggcttatgacgttctgactgaactagattcagtgtcatacaagccgtcctcggctgcaggttacgactatatcggtgcgaaaggtcctctaaatggtacaaaccataaagagcgattagtagagcaagccgtattgtggtctgcaatcaagcaggacggagaaggcattgaacatgtcatccaaacatcagtaccggacgtaagctatactcgcactcaattggcggatctaactgaaaagacaaaagttagacaagtatggggaagatcgtttcattacattctactcgaaggcatcgtcgcagatcctttcatacaagctatcactcgaagtgatacatttgtacatacaggtcaagatccgaccatcagtgtaccgcaattactatcgaaagttgcaggacaatctcaatttatctactctatcgattggaaaacatttgacgcatcagtcagcaggtttgaaataaacgctgcgtttgatctcatcaaatccaaagtttcctttcctaacatagaaacggagcaagcatttgaaataactagacagttattcattcacaagaagattgccgcaccagacggtttaatttacgaaatacacaaaggaatcccatccggtagctattatacctcattgattggttctatcattaataaactcagaattgagtacttatggagagtcacaactggtcatggaccacaggtatgctatacactaggcgatgattcactatcaggcgataaccactttctttcacctacaaagatgtcagaagttgcaaatccgcttggttggtatctaaacccagacaagacagaatactcacgtattcccgaaaatgtaagttttctaggaagaacatttctaggcggactcaacgctcggaatcttaaacgctgtttaagacttcttgtttatccggaattccctgtcgatacaggagagatttctgcttatagagctcagtcaattgcgcatgacgca

SEQ ID NO: 1455 - DNA, 1551 bp, Davola partiti-like virus
  source 1..1551: mol_type = other DNA
atgcaggtgacgaggtgtaactacccagtctttacgacgaatgtgcagaacgctaaaatttctggtcttggcacggactcaacaaagcgactcatacatcattgtggcgaccagtttcatttgaaacaagtcaaagatggtcctttgtttgacaacaagactagaaacgtgctgagaaagtacgaattgaaacctggagagatcaatcgtgaagtgaagtatctagactcaataagatacggaggggaaaaggatccgtcccaactcttccaacagattgagagatttcaacaggcccatgctccatcatttcagtggaacaaaaattatcaaagagctttaagaaaagtggagaagttgacaactcccatgattcagaggctaaagatccttgagtaccgttctgacgaggatatcaaggatgcgcttccaaagccagatgcccatagcggctttgagttcattgtgactggactaaaagaaaagggcatgtatattgaaggcgcgcgagatcatttcgaggaggagcttcaccaagccagaatgagaggtagcttttgcaaaccgatcatcactctgaatagattgcaatgttcaggggcttatgacgccgagggaaacaggactggagaatgtaagaagaaaacaagacttgtttctgctgtagacatctgggttgtgattgctgagttgatgtgggctaagccttttcaacgttttatggcatctagaccttggtatgttggtggtaagaaaccctgggagttgagagctaatgttgggcacaacagatggcatcacaaacagtggattagccttgattattcgaaatttgatcagtcattgccagcttggttaataagagacgcgttcaatatcatctggaaatgttttcagggatgtgagaactggcgctggctttgggacatcattgtcaatgacttcataaagaaagcctttgtcggaccagatggtactctattctacgccgaaaacggagtgccgtcaggaagtatgttcactcagatcattgattcgatatgtaatttgatcatggtccacacttatttctattctcttgaagcgaagggtcataagataagcgactttgtctgcattatttgcggggacgacaatcttgttttcttagatttcgacgtggattttgaagatcttgaaggctatttcaagaggaatttcggagtagaatgtaatgcgagtaagtgtgatagaggcgcacagactgacgatccagtgttcctctcacgattctggcaaaatcgtggtgagtggcgacttccgaaagagttgattgctaagatgttatatcccgaaaggtttagaccctataggaagaatccacagttgactcccgaagcaatagtctatagctacattctagcttttccacttggtatggaagagctgatcgatgtcagaaggtttatgaaggacaatgtgcaatacttaagaagttggtcaagtgctattttcgagtatcagagtggctatttgagttatgtcatgagatacgaaaactcgttgctatga

SEQ ID NO: 1456 - DNA, 1716 bp, Delitschia confertaspora partitivirus 1
  source 1..1716: mol_type = other DNA
atgttactttctgaaataccaaacgtctaccaacgagctctagctcttgaaagacggatccgtgttcgggaactctatcccgaaggcgtcataccttacctggcacggcaagagtatgcgggggcaatcgctaccccccgtggtccgtcggcttctgtggccccgagggtcacagaaacttttgttgccaaagctcctcttgcgacttaccgcaagcaggactatttgatggaatgtacggacactatgcaatacattggaaagatggatccctatcctttcaataactctgttccgaaattcgatccttggtttcgtcatgtgttgaaacaacgcgcacccaaagtctcgcttcacttagaaaacacctatatgcgtgatccgtgtacccccgatcgtgtcatgaaattcatgaagttattcgatcgcagttggaaacgcatgcctacgggacgtgtcatgaatcaagctaaacaaatagttgaagaactcttcgctccaatcggtctagtcgagcctatcgacttcaattttgctggttggcatgagatacttccccatttggacatgtcttcttctccaggcttgccgctccgccgtgagtacgctactcaaggtgaatgtcttggtcacatttacgacaagacgaagcgtctcaatcattacgctaagtttctacaccctggcgctgtccgcgccccaccctgtatgatcggtctccgtcctggcctcattaagaaggccgagttacaagaaaagatcaaggcacgcggtgtttgggcgtatcctgcagaagtgaaggtgatggagatgcgtttctgcgtccccttcgtcaagcgctgttcagatatgttcgggcgtatcccctatcccattggtcgcaacatgaccaaagcacttccttttgttattgattacttactggaggatcagaagtttggtcttgtaaccgatatttccaaacttgatacctcagttggtcctgactggattgactgggcattctcctcaatcaagaaacattttgatatgggtatcactcgttctgctgacactcgaaacgataatgtattcgagttccttcactactacttcaagcggacccccattctgctgccttcgggtcaattgattcggaaggtaggtggtgttccttctggttctggctttactcagattgttgatacttgggttactaccttggctactgtgtacactcgtcttcggatgggtcacgcacctgaagatatcaagcgtatcttcgttgttggtgacgacatggctacttctgtcccgcatgacttctctattgaagagttctcccacatcatgggacaactcgggtttgaaattaatcagaagaaggttatgttttccaacaagggtattgaacttaagtttctcggctactccaaacgtggtggcggtatctaccgtcccatcgaggagttacttcaaacggcctactttcctgaaaagtttgttggcaacccaaatcgctcacgccaacgcattctgggtcagtctctagcttctggtctttctaatagtttctttgataagtgtaattattggatggaggagttagtcggattggtttcagaattggatccagatgaagtgtttatacctcagaaacgctggatgcgcatggtgctttctttagatgaaacaccaaccaccgcaaatgtgtacgatctgtttcacttagtgtaa

SEQ ID NO: 1457 - DNA, 1749 bp, Dichroa partitivirus 1
  source 1..1749: mol_type = other DNA
atgcagaaccttaaaattattggtttacacgaatctactaaagatatcaaaaccaaagattatcacaatcccagctacaaaggaattgttcatcgcgctttcaagaagttcttacttcctgaagaaatccaagtgattaccgataaatatcgcagatcaatttggtccgaacagagcttttactctaatttggaacgcatcgacagtccagaacacacggttatcaaagataagcactattacctcgctttaagtgagatgaataaacgcttctctccacaagagaaattgaaaccagttcattacgctgatctcagactatatccttggagattatcaactaacgttggtgctccttacaatacgtcaaagaaatggatcgaacatgtgaataacaagttcaaatccggatctatcgataataacagaatgtcaaagcacaatctatataacgaatttttcgttaataataggcttcttttccatcgtatcaaagacggccagaccaccgacggttatggcaatgatcttaaatactggaacacagcttttgctagattacatctagttgaagaagatgaatctgataaagtcagattagtttttggcgcccccacacttctgctgcaggctgaaatgaccttcgtatggccaattcagacttcgctgctgaatcgtggtccctcagtttccccaatgttatggggatatgagactattacaggtggttggaaccggttaaatacctggttttccaataaccacccaaggttatctacatattttgcattcgattggtcacaatttgaccaacgtgcaaggcataccatcattgacgacatacacgacgtatggcgttcctggttcgatttttcatctgggtattaccctactcagacctatcccacatcagaaccggaktctcaaagacttgaaaatctttggaattggatgtgtaatgctattaaaaagattccacttcttctacctgatggtagacttgtggaattccaacattcaggaatctattctgggtttttacaaacccagttactcgactcatgctacaacatggtaatgattcttactatcttatcccgaatgggatatcatattgagaacattgcacttaaagtcgaaggagatgactctattggcggaatgatccccaccatcccaccaccgttatttccatccttccttgaaacgtttgcttcttacgcaaacgattattttggagcgattctcaacgaaaagaaatcggagatatcgcgtacactagaaggcatgaccgtcttgaaatacaagaataaaggttgtgtcccgatccgttcacaagaagagctgcttgccatgctctatcatcctgaacgatctcaggccctacccaacctaatggctagagccataggaattgcttatgccaattgcggtatgagcgcaaaagtatatcgaatttgtgaagatatttacacccatcttcagaatctcggaataactccaaaccccaaaggtttacccggagtcttccaattcgacgaactttttgttactccatctactgttccacccgatgaaacccatttcatccctgtaccccccaggaaagcggtcccgtccatcatggacgtagacctatcccactttccgtcttattttgaaacaatacatcttttgatgaaagacgaccgtcagctactgactgatcgtcactggttaaccaccttctttctagaaacaccaatctag

SEQ ID NO: 1458 - DNA, 1422 bp, Dichroa partitivirus 2
  source 1..1422: mol_type = other DNA
atggtgtatgagtttacaagataccgatcagagcttgaaaggcttcctgtaacccatcctcatgtcgtcagacgagagtctgccgttacttatcgagatgaatttgctttagagcaattactcgatttaaatcctgagctatatcctcaattccttgaggggtggtcaagaagttactatctccctgagaagcatcttcaagcgatcatgaattatagttcaagagacatacctatgtcacaaattcaagcacaagtctatcaagactcagttcttgaggtgaagaataggttacgtagccttccaagtgtgagggccttcgacattgtatccgagttggatcaagtgtcatacagagcatcctcagctgcaggctatgattatttgggcgcgaaaggcgaaaagtatggtcaaaaccatcttcgagcaatttccagagccaaggttatcatgtggtcagtcctagaggacggtgacacaggcatgaatcatgccatcacgactatggtacctgacgttggttatacccgcactcaactcgccgatctatccgagaaaacgaaaattagaagtgtatggggcagagcattccattacatattactcgaaggagtagtggccgatccattacttaaagcttttagtaacactgacacgttttatcatatcggacaagatcccaccgagagtgttccaagactactatcagaggtagcacgcgattgcaaatggatatatgcattagattggaaacaattcgacgcatctgttagcaactttgagattaatacagcttttgatatcattaaagagaaagtgacatttccaaacaaggaaacagaaacggctttcgagatttcaagacaactgtttattcacaagaaaatcgccgcaccagacggtaacgtctattgggcacacaaaggaataccttcgggtagctactttacatccatcatcggatcgattatcaatcgtattcgaatagagtatctttggagactcattacaggtcacggacctaaaatgtgttttacacaaggagatgactctttagttggtgacgatatcctgcttaggctggacataatcgctgaaagagctaaccaaattggctggtacttcaacccagacaagaccgaatattctacagttccagagatggtttcattcttaggacgtacctacgtcggaggaatcaacaccagagatctgaagaagtgtttacgacttctcatctttccggaatatcctgtagataacggtaggatatccgcctttagagcaaagtctatttcagaagacgctggcaatctcagcgaaatcttaaataagatagctttaaggttaaagcgtcattacggggtcgcttctgaacaagaagtcccgctttattttaaaacttatgtaccaggtatgtaa

SEQ ID NO: 1459 - DNA, 1851 bp, Dill cryptic virus 1; identical to SEQ ID NO: 620
  source 1..1851: mol_type = other DNA

SEQ ID NO: 1460 - DNA, 1722 bp, Diplodia seriata partitivirus 1
  source 1..1722: mol_type = other DNA
atggcaccactccgtttcttgaggaaggtgaaccgattcccctcccgaaaggaacaacacttcgacggcttcgcgtgggatgcacttaactccgtttctccggattcgaagaaagagtatctcaatcacatcaaaagtacatggcatcggccttccggggacgatactgttcttgaggaaaacctttcgcactatggcgaccctcttccgaggcgttgttatgacggcgattacctggctatcctgaagaaaaccatggacgaactgaaaccacgcgataaaataattccactcaccctaggcgcagcagagaagtcacctgatctgcccacgaccacctccccaggctttccctgggtcacacgaggcttccgcaccaaagcggacgtccttaacgacaaaggagctgttggtctgattcatcgtacctgggactcgattggaagaggtattccttggcaattgcctgattctatggcttttcaccgagttattgcctcacctgcggaaaagacgaagattcgacccgtgtggggttaccccactgaggtcatcatcgaagaagctcgcttcttcctcccactttggaaggagttgaaagctcattgcaacgagaccgacgctttttacggcatcggaatggaaacggctctctccggccactcccatctcgcccgctccttcgacctatctgacgtcaagtacgctctgtccgccgacctgaccaatttcgactcgcacgcctccgcctggatcattcgcgacatcttctcacacatgtcgtcttggttcgacttttcaaaggtatgcgatagtgaagggaaggtttggaacgtcaatcccgaccaaacttgccgtcgctggaaagcgatggtctcctacttcatcaacaccaagatccgcactccaactggaatgcgctttcagaagtctcaaggtgtcccctccggctcaatgttcaccaacatcctcgacacttgcatcaacgctgttcaaatgcgagtctgcctccgtcgtatctctgacgattaccccgtcaaagactactactatggcgatgactccactatctttctccggactggtattgacttgaacgctcttgctcgtgaactcctggacacatttggtggtatcctctccgtcgacaagacaatctacacggacaacgtggaaaacatccactggctaggttactactatcgaactaccggaccacgacgctcactcgactttatcttggcgtcttcactgttccctgatagggccgtacccacccctatcgattcagctgctcgcctgcttggccagctgtattcgtgcatggatcctttggtagctgtcgtcttttacgacgctatcaattggcttaagaaaacgtactctttcagctctcaggagcttgaagactacgttcgcgcattgccttcaaaagcaatgaagtacctcaccactctcggactgtcaatcgaagagatcaccctcccgtcttgtcactacgatcccttcggcgaccggttcataccggacgttctcccaaaaccgagttcgcgaaacttctttcgccgccgcgatccccacctcccgcgctacgccttcgttgccgaagcttaccaaaatcgagcgctacggacacagtcattcaaagatttctcacgctatactgaaaccttttctttctatgacgagttccaagaggacgaaaagtactttaccgactga

SEQ ID NO: 1461 - DNA, 1866 bp, Diuris pendunculata cryptic virus
  source 1..1866: mol_type = other DNA
atggaataccttattgccgatttttcgcgcataacacatttttttcgagatacgactaacttaacttatagtggcacctaccactttcaccctcgacatcccgaagtaaatttaaatgcatacgaagcacatcaacgcgtattacgatcattaatggatacacacctctttccgcatgaaatacaattaatcactgacgaacttcgccgttctgatatgacaattgaagccatactggctgacttttttgctaacgatgttgagtatcacgaaataccattcgactcacatattgagtatgggatcaaatgcatgcttgacgcttttcgcccgccaaaacgctgtcgcccggttcacttactggacgtacaacaccactacccttacaaatggcaggtcaatgctgaacctccgttctctacggatacctatttccttgacaacttacctacgtaccgagacttctggaacgaacgcactagttccttcgacaaatacgtcgacccagaagaactcaaccgccgtcttaggcaccgtaacatcgaaaatttactggataccaaaactccagcaaaattcggtttcctcaaaaacaccgtcttctcgtggactcgccgctggcaccacattataaaagatggatttacagacaccacaggtcttacctctgatgcctatctccgagaccgattcatttttccaatgctactacacaccaagactgctatcgttaagaaactcgaccctaacaagatgcgaaccatctggggcgtctccaaaccatggatcattgctgaaacaatgctttactgggaatacatcgcttacgttaaacaaaacactggggctacaccaatgctctggggctacgaaaccttcaccggtggatggctacgtttaaacgctgcactctacacctcccatgtcagattttccttcctcaccctcgactggaaacgatttgacaagaaagcttactttccgctaatctacaagatccttcttggcgtccgagacttcctcgactttgacaacggttatgcacctaccgtcgactatcccgatactaaatccacgtggactccacacaaatctcaacgtttacaaaacctttggctttggacaatcgaaaacttgttcaatgccccaatcgttctacctgatggtagaatgtacaaacgtcgtttcgctggaataccctccggtttattcatcactcaacttcttgactcatggtacaactacacaatgcttgcctccctcttatctgctttaagcatgaatcctaaatcttgtataattaaagtacaaggcgacgattctatcattcgcttaggcacactcattcctccctctcaacacgaagcctttttactcaagcttcacgcacttgctgacttttattttaaagcatctctttctttagataaaagcgaagttcgtaactcgttggatggttgtgaaatactatcttatcgtcacatccgtggcataccttatcgtgatgagataactatgttatcccaattttatcacactaaggccaggaacccaactcctgagattgcaatggcacaagcagctggcttcgcttacgctagttgtggacaccaccgtcgtgtttacaattatctcgagtcagtctacaaccactacgctgttcagggctacacccctaaccgtgctggcctctctctcgtgtttggaaactctcctgacctaattctccctcattttgagctagatcactttccaaccatctctgaaatacaacactactatacttcatcagtttatcgcaatgaaagccaaatgtccaaaatctggccacttgaccactttctctaccctcctgcggaaacctga

SEQ ID NO: 1462 - DNA, 1677 bp, Dragana partiti-like virus
  source 1..1677: mol_type = other DNA
atggaaagaaatccgatcagcgaattaccagccagtgaaggatatcctttggatctccgtccccctcgttgggattcaatcgcagtggaagttgcaaaccgtttcttcggaaagcaaacaatttcaggggttttaggcaaatataagaggtctcacgttacgttcgaaactttaaaagatgatgtatttgaatataatgtacgaacgaaaccacgtgttttaaacgaccctatatacgtagcttgcctacagtccgtaagacgagagtttgttccacaagtgccgattgtcccattaacgattggaggagcctccaaggtatccaatgtacctaaagataagtccccaggactcccgtggaaagagagaggctaccgtacaaaggcggaggtgctagccgaccctaaagcaatgggggagatacacggaaagtgggctatggtaggaaagggctaccatatcggacttcctgactcactctgttactttagatctcagatatgtagcttggatactaataaggttcgcgctacatggggatacccaacaggagtgtttattgaggaggctagattcgtctacccatacctacacttcctcaaaaacaggagagacgactaccccctagcctatggcgttgaaatgggaaagggtggcatgggatatatcgacgagatgttctcacgtagtggtgaggacacgaaagccattatgatggattggtctcgttttgacaagaatgtcccagcttggttgatacgtgacgcgttttctatcttaaaggaagcgtttgtcaccgaccgagtagtcgactccgaaggacttcaatgggaggtgaatcctgagatcaccaataataggtggtcgaagatggtgaattatttcataaacaccccctttcgtatgcctgatggtacacgatataagaagtcccacggagtgccatccggatcgtgttttacaaatataatagactcgatcattaacgctattataacaaggtactgtgtgtaccaaacaaccgggtttctacccgcctatgatatttacatgggagacgatagcgttgtgatggctcatggttgtgtgaacctagatgcaattgctcgtgtggcgtacgacaaattcgggtttatactaaacaccgctaaaagttacgttaccactcaacgagcgaacatccaattcctcgggtactataacgatagaggttatccaatccgcgatcaagatttccttatcgcatccttctgtctacctgagagggttcaggacccaaatcctttgtttacggcagttagagcagtgggccaaatgtggtcaaccttaaacgctgatgctgctcagcgttggctcgagatcatcatgtttctcgagaaagagcatgagttctcaaagaactggtttaaagaatggatggctgaaaagccaaattctttaaagtttctccgtttacatggtttggacgccacgacttttccagctcctgggtattttgataaggttacgtgccctatggcaccaccttttaggccagataggcgtcgtcccgtacatcgaatcacatctgttgaggacctgtactttatgtacctagactcctcgttagaggatttctatttcgagagtcacaaagagggtgaagctccagatgttgatgacgacataaacacctaa

SEQ ID NO: 1463 - DNA, 1761 bp, Drechslerella stenobrocha partitivirus 1
  source 1..1761: mol_type = other DNA
atgaaaatcattactactatcaaacaagcgctcgcttcgttctttctcccttatggagttcaagaaccgcacggtctcaatatcaatttcgagtttgctggctacgctgatcctaagatcaaagtttccatgaacccgcgttttgaagaagtctatcaagactatcagacctggctacgaaagtacgtcgtcaagcacttccctggccctatggcagagaagattatgcacggatatcaccatcccgtcgccacgatccccttcatggttgacaacctcaagaaaggtgaccttccggatcatcccgtccctcacgaccatcactacatggccgctagacgtgcagccgccgacgctttccgccctcctaagcgcattcggcccgtccatttcgccgacctccggtactataactggaattggcacccaaacgtcgaagaaccttattattccgatcccaagctacaacaatatgtcgaacattgctactccctcggccttattgatgacgctcgcctctcattcggaaatcttaaagacttcgtcttcatggacacacgtcactatcttcacctcattaaggatgggaagatcactgacccgaatcaactttggcctatcatgaagatacatgttaaaccagctttgaccactcctgacgaaaccaagatccgcgtgatctacggtgtatccaaacgtcatattctatgtcaagctatgttcttctggcctctgttccgttactatatcgaatcaaaagcctcaccgctcctgtggggtaatgaaacgttcaccggtgggatgtctcgtctacacgacatgatgtccatacctcgtctctatttcaagactttcgtcactatcgactggtctggatttgatctccgctctctgttctctatacagcgagagatctttgacgactggcgtgaatattttgatctcgagaatggctacatacctacacggacatatcactctacgaagactgatccaatcagaatggaacgtctctggaactggcaacgtgacgcatgcttcaacatgcctttcgttatgcctgacagaacgacctacaatcgcagatacagatgtatcccaagtggcctatttgtgacgcagttcctcgattcccactacaacctgattatgatctacacgatcttatcacgaatgggtatcgatatcactaacctcaagatcgaagtccaaggtgacgactctcttaccttccttcgcttctaccttcctcctaaccaacatgaacaattcaagttggatttccagaagtgggctacatactactttgaccacgtcgctcgacctgagaagacatcggttcacaacacgcctcaaggcgtagaagtattaggctacactaacaacaacggatatccagtccgcgatcagatcaaactgatggcgcaattgtatcatccaaggaatgtggacaagcaccattggaagtctcttcttatggcaaaagtttgcggattcgcttacgcttccgtttaccaagatcgcacggttataggattcctccgagacatatatctctcacttgaacgcaaaggctttcaaccaaaagccggccgcgtcatgcgtgatgttgttctcttcggtgaaaccgaattcgaggttccaatcgaccacttcccaacagaaatggaagtgacaagacatctacgatttccttacgctcgcacagacaaggatcgtgacaactacttcccgtcttggcacttctctgccacggaatag

SEQ ID NO: 1464 - DNA, 1413 bp, Drosophila biauraria male killing partitivirus 1
  source 1..1413: mol_type = other DNA
atgaagtatctcggaaaggcatctggattcggacaaaggttcgagccaccctcaccttccccttacctcaagtttctggctcctctgactggcgattatcagagaagtccagttacgctggctggcataagagacgacatcaagaagaatatttcaactaatgcaagacgtcctgccacacctctgtttgacgaagcgatacgacgcacttttcgcgcttttcagctaccggaccgaattccaatgttacatcttaatgatgttttccaaaaggatcttcctatttggagttcatcggctggtctgccgtggatgaatctcggctacaagaacaaaggtgaaatcaggaaagatcccgacgccatccaaagagttagatggttttggcatcgagtcaaagcgggcgagtccatccgccttcctgattgttgtgcttatgtgcgcgcgcatattgtaaagactggagagacgaaagtcagagccgtttggggctatccagcaacagtaacttttggcgaagctgtattcgctctaccattaatcaatgcgtacaaatccggtcgctatccaattgcctatggatatgaaactggtcttggtggatgtaagaaggttctccacgagttcaagggaaagaattttcttggaatagatttcaagaactttgataaaacccttcctgactggttgatcgaaattgctttcgatgttctcgcatataacatcgatttctctaagtatgaggaacacggtactgcacgtgtagaagcaatgttacgtatgtttagtatcttgaaaaactattgcattaaaacaaaaatccggatgtgcaatggtgagagatatcaaaagcgctggggattagcaagtggtagctattttacccagcttgttggtagtatatgcaattatttactgttaacgtatgcgtgcctgaagtattccgtacacattaacaagatcctagtgtttggcgatgattccttaattggaactgacgcattattaactcctgatgacattgctatggctttagaacctctaggcatgacagtgaacgtaagtaagtcgggccacagcgcttacttaggcagattaacgttccttggctacagcattaatgatggagttccaactagaggaagagataagacgatggcctctctagtttggcctgagcgacatgataaagattggattttcgccgcatccagagctcatggaattgcgttcgctaacatgggagttgatttactcgtagattactggtgcagacggatttgtagctatctgccatacaagctacagttatccagagatcagcagcgacacctagaaattttaggtttctcaagcattccagataaaataccaaactgttacgagtttatgcgacggcttggcttctgctag

SEQ ID NO: 1465 - DNA, 1761 bp, Echinochloa crusgalli partitivirus
  source 1..1761: mol_type = other DNA
atgaagaatatcgagataatcggttacaagccctctttggctaaacctattcgtggtaatgttgatcctaactcaaacattaattacggtaatatcgtcgattatgctttaagaaaatacctcactaatgaggagtttactatcgtcacacgtggctatcgtcgctcacaatgggctgaagacagtcttaaaagtgatttagataaactagattcagactactttcccgtgctcaaagatacccattattataatgctatcgaacacactcggaaattatttaaacctgattctttacttaagcctatacatttttctgacttgcgccattacccatggcagttatctactaatatcggtgccccttttgctactagtaaaagttggaacgaatacgtaatacagaaattcgatgaaggttttaccaaatcttattatcgagacttatttcgtgaagcccacggagaaagtctacttcctgagatgattgatcgtcgtatgacgaaacgcaatctatacaatgaaatgttctttattaaccgcacaaatatccacttaattaaagatggacacactactaactcaagtggtcatgatctcaaatattggaacacagcatttgctcgacagcatctagttgaatcccatgatgaagataagatccgcttagtattcggtgctccttccacatttttgatggctgaactgacgtttatctggcctttacagacaagcttactataccaaggagaacgttctcctatgctatggggctatgaaaccactactggtggttggtctagactatataaatgggcctcctctaggatgcctaggtatgattttgttgctactctcgactggaaacggtttgatagagacgctagacatactgtcatctctgatatacatcaacttgttatgagatcatattttgatttcaataatggatatcatcctacaatccactaccctgactccaccggagccaaccctcaaagaattgagaacctatggaattggatgactgacgcaactttaacgattccgctaatgttgcctgacggtaagatacttcgatttaaacattctggtatatactctggatacttccagacacaaatactagattcgatgtacaattgtgttatgatcttcactgttctatctagaatggggtttgatcttgaaagagttgaaattaaagtacaaggagatgattccattttcttaatgtgctatcctttcattactcttcaaaatacgtttctacagatgttcgctcactatgcgaaaatttactttggatcaactttaaatattgataaaagtgaaatattacctagccttgaaaacgctgaggtattgaaatatcgcaaccatggtactatgccatatcgtgaagaactacaactattagctatgttgagacaccctgaaaggactgtctcgttaccatcgctgatggctcgatccatcggcattgcttatgctaactgtggattccactctcgtgtctaccaaatttgcgaggatatctataactttctgaaagccggaggctatagccctgacccgcatggtttaccaggtagtctacgctataggcaaaattacgttccaggatattctgaagttgacattagtcacttccctagttattttgaaactgtccgccttctccaagagccaactcgtgacttagtttccgaaaagcattggccattaaaacactttatcggtatccccggaaagtcttaa

SEQ ID NO: 1466 - DNA, 1821 bp, Entoleuca partitivirus 1
  source 1..1821: mol_type = other DNA
atgaaattctccaacattaaaattcttggctacaagcctgaattcgctgtgcccatccacggccgcgatccgaacgtctcgaacccgctgactgatatctacaacaaaatagtagataatgctctcaaccgctttctcactcctgacgaatctgatcaagtcatcaatggatatcgccgctccgcatggaacgaagatgccctaaaagaagacatcaatcgattagactctgacgaacaccccgtcgataaagacgaacactatgaaaaagctctcaatcatgtgtacaacttgattaaacctgagaagcctcttcagcccgtccatttctctgatctccgccactataaatggcgcatctccactaactgtggtgctcctttcaacgctatgaagcgctggaaagattatgttgttgcaaagttcaagtattttcaacgctcccagcctttcgaaaacattgcacatcgtgatttattcactgaagcgcacgaatcttccgaacccctcgaaatatccgacactcgaatgactaagcataacttatacaatgaactgtttttcatcgcccgcaaagtaatccaccgaattaaactcggtttcacttctaactctcaaggtgaatcttacctgtactggaacaccgctttcgcccgtcaacatctcgtctcaaaagatgagcctgataaggtgagacttgtttttggtgcccctttcaccctgttagctgctgaactaatgttcatctggcctctccaagcccatctcctattcatgggagaaaagtctccgcttctctggggatacgaaacaatcttaggtggttggtatcgcttacgcaactacttctctcgtgtcattccctactacggaactgttttcacatgtgactggtctggatttgatcgccgtgctcgacatactgtaatccgtgatatacaatcacgaattatgcgccctatgttcgatttttcacaaggctatcaccctacctacaagtatcgtgattcatcaaaccctgatccccgccgcaaagaagacgaccttccgatctctgagaaacttgagaacctatggaactggatgtgtgacgctatcttacgaacgccactccttatgcctgatggtacgctcctcgaattccaacattctggaatttacagtggttacatgcaaactcaaattcttgactccctctacaacatggttatgttattcacaatcttgtctagaatgggttttgatatttctcggctcaagctgaaagtacaaggtgacgactcaatctgtctcctactccaactattcatccaactagctgcaggattccttaccctattcaaacactacgctacatactattttggcgctgtgatgaatgaaaagaagtcagaattgcttcccactctcgatcatgccgaagtccttaaatacaagaataagtgtggtattccatacagagatgaactctctcttcttgcccaacttcgccatcccgaaagatctactactcccgaagctctagcttcccgctgcattggtatcgcctacgctgcgtgtggacaacttcctcgtgtctacatgatctgcgaagatatatacaactacttaactcaagtacgtggtacgattccaaaacagtcagaactagatttctacttccgttatatcgaaatgtcctccggacaaatatttcgaccaactgctgctcgatttccgtcttatcatgagacgatgtcgcacttaatggatgctcatagtcccgtcgctccctcgcactggcctcttgaccatttcattggccgccctggtcaacactga

SEQ ID NO: 1467 - DNA, 2256 bp, Entoleuca partitivirus 2
  source 1..2256: mol_type = other DNA
atgccgttcaacacccttcgcaactaccttgccgaaaagatcattcgcgtccgcaatgaatggaaaatcttccaatcaaccgaccaagatcccgaacagactctcgaacagaaccaagattctgacactactcgcatgtacaagctcaagtattacaacacaaaagatgaagccaaaacaagaatgctaaatcaagaatactcgactctcgttgaagcaatgcgtaccgactaccaaactcggcaccagcccttcgaactccacaagcccgtcgatcctgacgcccccttccgtgaagaccgtacccctgctcctggaatcaagactgtcccacttttctaccatactggtcatgtaatccacgccaacccagaaacttcccgtccgctcaatcccgacaacgaaaccgatgctgctgaatcctacatcccaggtgatatcgacttcggacctgaaattgacccacatatacgctgtctcctcgaacagaaatatccgtcataccttccttacgtccacaaatactgccgccctgccggtacaactgatgctacgttccgcgacttcaataaagaacaaaaaccttctgctccaattgatcctgcccgcaaagaacaagtcctcaaacatgtatttcgcctcctcgatgccactccttaccttcctcttcactttgttgacacacagtatgctaagctcccgctctctactggtactggatatcacaaccgattctccttccgacaaaaagctcacgcaaaatattcccacccccccgaatacgctgaaaaacccacttctaaaggctacttctataatgccacctatgacatggcccgcacgctcattcataaaattaaagaaactggcgttcctttcaacttccactttgctcctgaagatcaagacgtctctgatgaacaagtccgcgattatatcgctaaatgtgacaacttcttcaatgactacccaacgctccttttcacccgtaatcatatctccgatcgcgaaaagactctcaaagttagacccgtctatgctgttgatgaacttttcattattatcgaagttatgctaaccttccccctcctcgtacaggctagaaagccctcatgcgccatcatgtatggtcttgaaaccattcgtggttccaatcactattttgattctctcgctcgcgcttattctaccttctttacgattgactggtccggctatgaccaacgtcttccacgcgtcattactgacatctactacactgatttcctccgccgcctcatcattatcaatcaaggttaccaccctacgtatgaataccctgaataccctgaccttactgaacataacatgtacactaaaatggataacctcctccacttcctccatctttggtacaacaacatgacattcctttctgttgatggttatgcttaccgccgccttttcgctggtgtgccctccggtctatataacactcagtatctcgactcattcgccaacctattcctcctcgttgacgctatgctcgaattcagttttaccgacgaagaaattgagaagatacttctctttgtcctcggcgatgataattctggattctgtccctatgatattggccgcatgcaccgcttcctccaattcctggaaaagtacgccctcgctcgttataatatggtactctccgcaactaaatccgtcctcacgactctacgctctgagattgaaaccttaggttaccaatgcaactatggacaacccaaacgtccacttgacaaactagtcgctcaactatgttacccagaacacggtatcaagtttagcacaatgtcgtctcgcgcaattggaatctgtgtcgccgccgctggccaagacaaaaagtttcattccttttgcaacgatatttacactatgttttctcctttctggaaacctagccccggactcactctcgacatgaaacgtcgcttcttcgctgatgaagaagtagacctgccattcctttctgacgatactctaatgcccttcccctccttccaagaagttcgtaagatgtacgccacctaccaaggaccactctccttcgctcctaaatggaatttcgctcatttcatcatgcctcctgactattgtcccaccacccgcaaaactatgcacgattatgaacaagaacactctctttacgttcgaattgcgcctactttcgcaactagtgaacctagcacaaaaatttcccgtgattttttttatgtcatttaa

SEQ ID NO: 1468 - DNA, 1668 bp, Entomophthora partitivirus D
  source 1..1668: mol_type = other DNA
atgtatcgctcacgagaaaaagagcttaaaataaaagacctcggagaggcaaaacgaagacaagtaaatcagatccacccaagggtgaagataaatagagacgtctcaaaggcaatgaaacagctgcctgacgctcagggattcgcgatgaacatgactccccctcgagaggacaaaaaagcgagaatcgcttgtgacacgtactttggagccgaattagtttcaaagataaccagcaaacttcataggagcactataaattatgatgcccttattgatgatctatttgagtatgatcgagaacatgtaccacgtggtagaatgtctgatgagagtaaagtaatttacaagatggtattagagtccataaaagatgatcttggtaaaccgaatttgacaccaatgacttttgaagaggttagatccttacctgattttccaggtgcaaaaagtcctggtttaccttataagaaccaaggttttagaacaaaatctgaagtattcgatgacccattgaaacttaagaaccttaaatctacgtggagtgatgttggtttgggtaaacatgtagtattgcctgatgtttgcctatttgcacgtgcgcagattgctcgttatccggaaaagaaaataagagctacatggggttactctttcgatgtgtatatggaagaagcgcggtttttctatcctatacaagaattcattaagaaacatgaacacaacttcccaattgcctatggtcttgaaatggcaaagggaggaatgtcaagcatcaatgatatgctgacgcgaaaccgtggatgtaaatacgtgataagtgactggagcaaatttgacaagaccgtacccctttggttgatacgggatgctttccagttattaaatggcttgatttgcccagaggtaatgggtgcacactcaaaacgtaggtggaagaagatagtggactacttctgcgaaacaccaattcgcacttgtaaaggcgaacgatttatggtaattggcggcgtaccatctggctcttgtttcactaatataatagattcaattataaattgtattgttactcgatttctcagctatcagacaacaagtgagttcccacttggtgagatatttttgggtgacgatggtgtcttcgttatgaagaaccttgtttgtttggaggacttcgcctccgtagctctattatattttggtatggtgcttaacttggataagagttacgtcactaccaataaacagaatgtgcaatttctgggttatttcaatcttgacggtgttccctttaagaatctggattacttaatagcatcatttgtatttcctgaacatagacgcactaagctgatagatacttctgctgctgccctggttcaaatgtattctggctttgaccccggatatgctagcgtttggcttaagatcatacatttacttgctgaattcgagaataccgatcctttctcccttcaggagattgttttacgtctacgaagtcaagagtatcgacataaatatttagcacatgtcggtgtaaaggtcgagaatatgacagtcccttctctacattccagctttattcatgaggtattgcatcatcctaattgtccaataaagcttgaaaaccgcaattataattacaaggatctgtgtaatcgttaa

SEQ ID NO: 1469 - DNA, 1722 bp, Erysiphe necator associated partiti-like virus 1
  source 1..1722: mol_type = other DNA
atgcccattaaatatcttcgtcgagttaacaggtatcccgcccaaaccggggtattcttcgacactttcgcggccgaagccatggttgccgtttctccggactcggatttaccgtggttctcctcaatcaccaaggaatggcatcgtccctccggggacaaccgtcttctagacgatggcctgctcaagtacaatgttaccaccccgaaaaggtgctatgacggcgattacttggctatcctcaagaagaccttggatgaattgagaccttccaagcgattgatccctctcaccctaggcgcagccgccaagcatgcagacttccccaaaaccacatctccagggtttccctgggtgcatcaaggttaccattcaaaaggggatgttctcgcaagcaaggatggcactgggcacattcatcgtgcctgggacatgattgggaaaggtacaccatggtcacttccagattcgatggcctttcaccgtgtggtggcttctgaagtcaccaagacaaaggtccgtcctgtctggggatacccagttgatgttgttcttgaagaggcgaggttcttcctccctctcttagcttatctcaaggacgaggtcaatgttcgcgactcgttttacggattgggcatggagactgcccgttctggtcacgaacatttggctcgcagctttcatcaagctggaatcaaactgagtctctccggtgacttgtcaaattttgatgcgcgcgtaccagcttggatcatacgagacgttttctctctcgtttccgactggtttgacttttcgaaagtcgttgattcagaagggaaattctggaatgtaaacgttggacagacttgccggcgctggaaagccatgatatcgtactttgtgaacacaaaggtgcgatcaccttctggtcttaggatccagaaatcaagcggcgttccatccggatcgatgtggacgaacttcatcgatacttgcgtcaatgctgtccaaatgcgtgtctctctttaccgcgtgacctcacgtctgccagccaaagattactactatggcgatgacagtcaggtctttctctcttgtgattccatttcacttgatgctcttgcggaagagttgttgcgtgtgtttggcgccatcctttcagtggaaaagacaatcctcaccgataatgtcgagaacatacattggctcggctattattatcgtcctggaggcccacgacgtcccttgacattcattgtggcgtcaaccttcttccctgaacgcgaagtcgactctcctcttgagtcgtgcgctcgccttctgggtcaactctactcttgcatggacccccatgcttcagtccgcttctatgatgctgttcgatacatcatgaagtgttactgtctgaccaaggatcagctagatgactacgtctcctcaaagccttccaaggctttcaagtatctagcgactctcgggttagaggtgtcagatatagtccttccagactgtttcgttgacccgttcggagacaggtacattccatccgttatggcacggccttgcccacgccgttttgtcccctatcgtgatgcgaacctgcctgccttcgcgttcattcctgaggcttatcagaatcgcaacttacgtcagaaacttttcaaagatttcaatttatacactcaaactttcagtttctatgacgagttcgatctcgactttccgtattttacggactag

SEQ ID NO: 1470 - DNA, 1075 bp, Erysiphe necator associated partitivirus 1
  source 1..1075: mol_type = other DNA
atgagcaaatcaaatcctatccgtgactacctatccgaaagaaaccttcgcattaaaaccgaatggaaactatttcaacagtcccaaaatagcgacgaatcactttcacagttgacatccgactccgatcttaaacgcctatatcatggctcaagacattacttaactgaacaagagaaatcacatgccctacaatctcaattcgatcaaatacttcacgatctacaaattaagaacaaagacaaacacgaaccatttgagtattttactccacgtttactacccgtcccttctaaccgagaaccttcccctggcattactctcctcccgcttcaatatcatgttggtcaaaccgtcaccacttctgaacacttaactgaacaaggttttccccttgatccgattctaacaacacttttgactactaagtatccacaatatttagcctacactcaaaaatactgtcgtccacttggaaccactgaatctactttcgctgattttaacaagccacaaatacatatatcaccatcacttccagaacgcaaggaacgcatactgaaacatattttcagatatttagacgctaaaccttatctacccgttcactttgttgatacattatatgcaggactcccaatctctactggaactggctaccacaatcgtcattcctacaagattaaagctcacgctcgatattcacacccgaaagaatatgcatctaaacctacttctaaaggctacttcttaaacgcttttctcgaacaggctcgaacaatagttcaccgcattaaattatctggtcttccattcccctggacccttccttctaatccaacagaccaagacttcacagctctacactctagactgaactctttcatcaacgaatacccgacactacttttcacacgtaaccacatttctgaccgagatggaaaacttaaacaacgccccgtttacgctgctgatgaacttttcatcactatcgaaactatgttaacgtttccacttctagtacaagcacgccattttcaatgctgcattatgtacggtctcgaaactatacgag

SEQ ID NO: 1471 - DNA, 1722 bp, Erysiphe necator associated partitivirus 11
  source 1..1722: mol_type = other DNA
atgcctctaaaataccttcgacgtgtaaaccgctttcctatacaggatgagcgatttgtcgatacgttcgcatccgaagccatagctgccgtttcttccgagagcgaaagcgaatggttctctaacatcgccaaaacgtggcaccgcccctccgggggaggccaacttctcgacgatggcatactcaagtacgacatccacacccgtcacaggtgcacggatggcgattaccttgccatactcaagaaaacgattgacgaactgagaccggctgagcgtatcatccctcttaccctaggcgcagcagcaaaacacccggacatgccaacgactacatcacctggttttccatggatccatcagggattcaaaaccaagggagaagtcctcactgaccgcgctgccaacggacacattcatcgtgcctgggacatgattgggaaaggtatctcatggtcgctccccgactgcctggcctaccaaagggtcatagcttcagaacaaacacgcaccaaggtgcgcccagtttggggatatcctgtcgatgtcgttctagaagaagcaaggttctttctacctcttcttgccgtccttaaggatctagtaaacgacaaggactcgttctacggtttgggcatggaaaccgcccgctccggacacgagcacctcgcacgctgtttcgcctccgctggcatacagctaagtctatcaggcgactttcaaaattttgatgcacgagtgccagcttggaacatccgagacattttctcgcacgtatctgactggtttgacttttcaaaagtcattgattcagaagggaagatatggaacgtcaatacagatcagacctgtcgtcgctggaaagcaatggtctcctacttcatcaacaccaaggttcggtcaccaaccggactacgtgttcagaagtcacatggtatcccatccggatctatgtggaccaacttccttgacacatgcgtcaacgctgttcagatgaggaccgctctctaccgcacaaccggagcactacccgccaaagactactactatggcgatgatagtcaagtgtttcttgtaaacaaacacatctctctggatgctgtcgcgatggaactcgacctcaccttcaatgccatcctttcagttgacaagaccatcctcaccgataacccagacaacattcactggcttgggtactactatcggcctggaggacccagaaggtccatggagttcatcctcgcttcaaccttctaccccgaacgccaagtcgcaacggctaccgagtcttgcgcccgcatgcttggtcaactctactcctgcatggacccccatgcatcggtacgcttctacgacgccatcaggtggctcatgcagaagtatagtatcgataagactactttagatgcttacgtttccgacaagcctgccaaggctttcaagtatcttagcactcttggactagacatgtcagacatcacacttcctgacgtgttcaccgacccattcggagacaggtacattcctgctgtgctggcgcgaccttgtccacgtcgcttcacgccctacagagacatcaacctacctgactacgcattcatcccggaagcataccagaatcgatcattccgtcctagtggattcaaagatttcaatattttcaaaactacattcacattctacgacgaattcgacgctgacgaagcttatttcaccgactga

SEQ ID NO: 1472 - DNA, 1752 bp, Erysiphe necator associated partitivirus 12
  source 1..1752: mol_type = other DNA
atgcaacctactaccaatttgaaagtaataggccacctaccgaagaacaccaaagtcttcgcgtttcatcaaggtcgtcaagacgctttgagaaacatgagcgaaaaactggttaagaaggcaattcacatggaatgcacacctgagttagcacacaaggctattcacgggttcagacggtcagcaggaggagatgagatagcagagaaagactttcttaagtccgatcaaccatatcatcccgttccacgcgaccatcactacaagaaggccctcgccacatgcgagcgactcttccgtccatcacgccgtcttaaacccatcgcctaccccgatctgaggtattttccttggacactgaatgtcagtgcggaagcaccgtactcgtacagtcagtactgggcgagagagcttagacgtatgcaggctgaaggtatcacgcttgacagcaaacccaccttccacaacctctacgatgagatttttcacgacaataggagccacattcacactatcaagtttggccttgccccattctgggacaaggagaccggtaaacctgtgccatacaagtggaacacacttcacgcacggtcacacacggtcaaggcagacaaggacgacaaaatccgcgcagtattcggcgtgccaaagttactacttatggccgagaacatgttcgtttggaatctccagaaggagtatctgaacaaacgagttcaatcaccgatgctatggggatacgagacattcaaaggaggatggcagaaactatggagagatttgtacaaaacaaacttcaactccgttctgtccgctgactggtcgggattcgaccacaacgcccttcatgaagtcatcgacgacgttcacagcatgtggagatcgtggttcgattttgaccaaggctacgagccgtcaagatccgacacccacgactatcacgcttcaaagacagaagaatggaaaatcgagaatctatggacttggatgacacactcaatcaagcacacccctattcttggcttttccggcaccatttacgaatggtcatacaacggtatcgcttcaggattccagcaaacgcaactcctcgattcgttcgtcaacgccatctaccttctgacttgcttatccgcctgcggcatcgacatcgacgcccccggattcaacctgttcgtccaaggagacgacagccttactaccttctcagagagggtattccagtttggaggaaaagaattcctcgccaaactagcacgcgaagcaaacattcgattcaacgcagtactatctgtggacaagacaacccacggtacgtcactcaatgacgtagaagtcctgagttatcgaaacaaccaaggtatagcactccgcgatccagctgagttactagccaagctactctaccccgagcgccccaagcgacttggaggtaccgcagcttcagccatcggcatagccatggccgcaatgggatcatcgcctcaagtgtacaacacttgtcgcaatgtatacaattttatcgtttacgaactagaagtagaagtagactttaaagagttcagagcttacagcacagtacaccaatctgcagctgaagaggccctggctttacaaccaacacggttcccgtcatacaacgagacactgtgctacaactacgacttttcaacacgttccgagaaagagaagcaacgcctttggcccaccaaaccaactggcaacggctttcatttcctcgtcaactaa

SEQ ID NO: 1473 - DNA, 1620 bp, Erysiphe necator associated partitivirus 2
  source 1..1620: mol_type = other DNA
atggaagattttactttagaacccaccaaccactacgtcctagctaaggggtctcatttagttgacgcactccacctcaggcctgcaaagccggggtcagccactagtgaagacgttatcccttccaattttgaatcgccaaacttgaccgagattgcaaagtatggcggctattcaacttacagctctaactcgaacacggatcctcaggttcgagagagtctaaaactttattccagagacatttacgaggaagtccgtggttatactcgcagacctcagggaacacctggcatgtacactgccttgaaaaagttcgctggcgagaaaaacacatttcggagtctctctccatcacaacaagcttcgatgcggcgatcaatcgctaaagcaaagaagtcgttcaagttgccatacaagcgtgaaccgcttgattggcacgaggtaggtcagttcctcaggcgtgacacgtctgcaggatccaccttcatgggagccaagaaaggcgactgtatggaggagatttaccatgaagcaagatggttaggacaccgaatgaaacaggacggtaaatctagtttcaatccatcgaagatgcggttccctccgtgtcttgcaggccagcgtggaggcatgtcagagattgacgagcccaaaacgcgcctggtttggatctaccctgctgagatgttgtgtgtcgaaggattctacgctcctttgatgtatcgtgactatatgaacgatcccaattcaccaatgctcaacggaaaaagtgcgcagcgtttgtacacccagtggtgctgcggactaagggaaggggagacactgtatggcatcgacttttcttcgttcgataccaaagtacccgcgtggctaattcgtgttgcattcgatattctgaggcagaacatcgagtggtctacctttgacggaaaacccgtgaacaaggaagatgcacagaagtggcgaaacgtgtgggatgccatggtgtggtattttattaacactcccattcttatgcctgacggacgtatgttccgtaaatacaggggtgttccctccggatcgtggtggacgcaaatgatagactcagtggttaaccacattctcattgactaccttgcggactgccaagatgtagagatccgaaacctgagggttctgggcgacgacagtgcgttcagggcgaatgaccagtttgatctggaaatagccaaacaggattgcgagcctacggggatggtgataaaacctgagaagtgtgagaaatcgttggatccatctgattttaaactcttaggcaccaagtaccgtgatggtcatgtttttcgaacgacagacgagtggtttaagctcgcgttgtatcctgaatcaagtgtgttatcactagaagtctcgttcacccgtttagtcgggctatggataggcggcgccatgtgggataaggtcttttgtgaattcatggattattatcaaacaagctatcctgttcctgaggaggggtggttctccaaggatcagaagcgatggttggaagtcgtgtattcaggacgagcacccagaggttggactaccaagagaagtctcttctggcgatcaatcttctacgcctttggctag

SEQ ID NO: 1474 - DNA, 1620 bp, Erysiphe necator associated partitivirus 3
  source 1..1620: mol_type = other DNA
atggaagatttcactcaagaaccaaccaaccactacgtcctaggaaaggggtctcatttagttgacgcactccacctccgtcctgcaaagacggggtcaaccacttccgaagacgtaatccctcttcaattcgaggaccccaacttacgtgaaatcgctaagtatggggggtactcaacctacagctctaactctaacaccgatcctcaggttagagagagtctaaagttattctcccgagacatctacgaggacatccgtggtttcactcgccgcccacaaggaaacgtgggtatgtacacttcactcatgaagtttgctggcgggaaaaacacattctccagtctctctccatctcaacaagcctcgatgcgccgttctatcggcaaagcgaaaaaggcgttcaaattgccgtacaagcgtgaaccgcttgattggcatgaggtaggtcagttcctcaggcgtgacacgtctgcaggatcaactttcatgggcgccaagaaaggcgattgcatggaagagatttaccacgaagcaagatggttaggacacagaatgaaacaggatggtagatctagtttcaacccatcgaggatgcggtttcccccgtgtcttgcaggccagcgtggcggcatgtcagagattgacgagccgaaaacgcgcctggtttgggtattcccagcagaggtgttgacaatcgaaggtttctacgctcccttgatgtatcgtgactttatgaacgatcccaactcacctatgctaaatggaaaaagtgcgcaacgcctttataccgaatggtgctgcaaactaagggaaggggagacactatatggcatcgacttttcgtctttcgacacaaaagtaccagcgtggctaatccgtgttgcatttgatattctgagacagaacatcgagtggaccacctttcagggcaaacctgttgacaaggtggaagcacagaagtggcgaaacgtatgggatgccatggtgtggtatttcattaacactcccattcttatgcctgacggacgcatgttccgaaaatacaggggtgtaccctccggatcttggtggacgcagatgatcgactcagtagtgaaccacatacttatagattatctggctgactgccaggaagtagagatccgaaacctgaaggttctgggcgacgacagtgcgttcagaggcaacaaccagttcgacctggaagttgcaaaaatagattgcttgccaactggcatgatcatcaagcctgagaagtgcgaaaggactctgaatccatcagagtttaaacttctcggtactaggtatcgtgatggtcacgtgtatcgtgacaccagtgagtggttcaagctagcactctatcctgagtccagcgtgtatacgttggatatctcattcaccagattggtgggcctgtggctaggtggcgcgatgtgggataaagtcttttgtgaattcatggacttctatcaaacaagctatcctgtacctgaggaggggtggttctccaaagatcagaaacgatggctcgaggttatctattcaggcaaagcccccagaggctggactacgaaacgtagtctattctggcgttcaatcttctatgcgtatggctag

SEQ ID NO: 1475 - DNA, 1719 bp, Erysiphe necator associated partitivirus 4
  source 1..1719: mol_type = other DNA
atggaacaacttattcaatcaatgaataaattaaccataaactcgaactacgttttcattggagacactgaccaccgtcaactccctgtgcagacaaaccaattcgctttggaagcacacaagaaaacagtattgttctcaatggctaaacatctcttcacgcacgaagtggaacaagtactttcattacgtcgacccgaccctaatgacattaatctcgtctactcagacttctttgctggtgacatccctccccactctatagaaaaagacgacatttactatcaagcacttaaccacgtaacggacctattctgtccgccccaacctgtgcgccctacacacatcttcgatgtgcgttaccactatccacatgaacgctcatctaatgccgaagcacctttctcgaccgaaaagttctttcgtgacaaggctccccgccctccacctggcactaagataaatctgttctcagttggtaacatgtatgatgttattttcgactggacacgtcatttccaccataaaatcaagcaaggtgcaaactatcatgattatctctggtatatccaattgcataatcgcacttcacttgttggaccttccgacccggacaaaatccgctctgtatctggttttccacgaccacaaaacattgcatggatcatgttcctttggccctatttatcatggttgaaaactcgtgacccacgaacttcccctatgttatggaattttgaaaccaatcttggtggctggttcagactgaactatctactatacaccggtttccacgcccgtacaatcattactctagataagagtaagtttgacaaattctatttcttcgccattcaagatgatatcgataacatgatcgagaatttcctcgacttaaaccatggctacataccaactactgactatcctgacacctctaaggactggacgcttaataaagcaaaacgactacgtcgcttacttcattggctatactatagctttcgcgcctgcccaactgtcacacctcacggtcaaatgtttcgtcgccgctttgctggaatgccatctggcgttttcccagtacaactattcgatactatctactttgcaattacagacactgatgtccttctacgcatgggaatctcccctgctcaaatacgcctaagaaaaggccaaggagatgacattattactcaactctatatttgcataccacccaacgcccacgacagcttcttgtctacgtactcacgtattgacaacgaacgattcggatctactattagtgtaacgaaatcagaaatgcgtaactcacctcaaggtgcacacgtattaggttatcgcaataagaacggtttacccgtccgcgataccgttgatctcattggctcactttaccacgctaaagcaagacaaatcaacgaatcaatcagcatgtcgatcgcagttggcatagctcacgcttccttaatgcatgataaacgcgtttacgcgatatgtaaggatgtgtactattactatgctaaccaaggctttacaatgaaccagaactggttacgccgtttctacgcgtataccgggatctctctctctcacgtcacggattttccaacccctgacgagatatgtaacaaactctttgacttttcttttgaacccagaaagcaaacagttgattacttcccaagatcccactttctttctgagttctaa

SEQ ID NO: 1476 - DNA, 1645 bp, Erysiphe necator associated partitivirus 5
  source 1..1645: mol_type = other DNA
atggaaagctctaaacacaagaactttctcctcgaacgacttagcaagttccgaccacacgtccctagcataaatccgttctccactgcaaagcaccaagctacagtcgaacacgctatacgccgttactgctatcctcaacagatcgaaacaatcctacatggatacacccgccatgaagttaccgaagaactcatccttcaagacttcttttcaggcgacgttcccgatcatcatgtcccaagagacgaacactatctcaaaggccttgattacacccgtcacttcttcgctcccccgaagcctgtcagacctgttcacatccttgatgtccaacatcactacccgatgaagaacaagcccaacgctgaagctcccttttccactgaaaagcacttcgttgacatgattcctccaaacacgaagacatccgtcggcaacatgaaaccaatcatctttgatcacacacgaagatggcatcatgaaatcaagaacaacgcagaacctgcacacagatatttttatcaaatgctgttgcacatcaaaactgccttgactaccactgcctcaccagcaaaagctcgaagcatattcggagttcccaaaccctggatcatcgctcaaattatgtttttctggcccctgttcgctttctacaagtcccacaaaggctcctctccactactctggggatacgagaccttcaatggtggctggatgcgcctcaattacgaattgatgcacaactacatgcgtacctcaatcctaatgattgactggaaacgttttgacaagtttgcactcttcaatgtaatcgacgacatctttgacattcaacgttcatacctcgatttttctcgcggttacgtcccaactattgactacagcaacacagctgatcaatgggatgcaactaaagaagcacgactccaacgcctctggcaatggacgctcaacgctttcaaacagacccctgtccttctaccaaacggtgaagtctactcaagacaacacgctggtataccttctggactatacacaacacagtacttagactctatgtacaattgtgtcatgctcataaccatccttagcgcaatggaaatcccactgtctaaagaaatgatcatcaaactcatgggcgacgactctctcatccgtctccttgtctgtattcaaccaaatctgcacgaagatttccttctcaaaatgcagcatttcgcgaccacctactttcaagcaatcatctctgtcgaaaagtctaaaatgacaaaccgaccgaatggcgctgaagtactatcttacatcaaccacaatggcttaccccatcgtgcgtctgactctctcctggctcagctttatcacactaaagctcgaaacccaacacctggcaaaaccatggcatccgcaatcggaatagcctacgctagctgtgcccacgacaagcaagtctatcatgtatgtaaagatatatactcatactacctctctcaaggtgtagaccctgatcccaccggtctcaccctcgctctaggcgaagatccatttggactagatccatccggcatctccctcgaccacttcccttctcaacacgagatccaagctaacctcactgctttggattacgtaagtgactctgtcc

SEQ ID NO: 1477 - DNA, 1572 bp, Erysiphe necator associated partitivirus 7
  source 1..1572: mol_type = other DNA
atggcagattcttttgtcgatgacgatgaaacatttggtaacgacaacccgtccgtgtgggactatcctttccggtacatcaccgaaacaaaaaggttcccagactacaaacgtggtattcttcgccaaacgcagcgatacgatcctttcgtagatgttgcactcaaacacttcgatcccgaactcagggaggagatcaaaggctacacccggtcacctggtgacgagtgggacctagcagacaagttcagaaaatatgacaccgccactctcagtcatcctactggaaacgcaagattcaccgccgcatacgaccaagccgtcaagacagtcatgtccgaattcaaacttcgtgcacctgtcgttcctcactggattctagacattgacctagtcaagtctacttcttctggatatcctcactttcaacgcaaaggtgatatctttgaccaactacgtcaagaagggagattccacttccaccatcttaagctcttcgatttacatcgttgcccgcttcttccatgtgtcgcttcgacgcggggaggtttagctgaggcttccgacccgaagactcgctttgtgtggatgtaccctgccgcaatgactgcttgtgaagcagtgtttgctcaaccgctgatcgacaaactatacagcgagaaagcagacctcttgctcacaggagttgattccaaattccgcatccaaaagtttatgtctttactctctgacgaggaaggcacatccggagttggcctcgacttcaagtcatttgacacctttcgaaacacacgtttaatacgtgatgcttttgaagtgttgcgccaaaatatcaaatttggctactactacgataaagtccatggattacaaaaaggacgatccggagtagacgttcgtgccatgaaagcattcgataacattatcgagtatttcattcacacaccaatgcttttgcctaatggccgttgtgttactaaacatcacggtgtaccttctggctcgcatttcacgaacttgattgactcaattgtcaatcgaattctgattacaactttcgccttgtattcagacattccaatcaaacatctcaagaccaacggtgacgactcggcttttacagcctcgaccacctattcaactggtatacttgagaaagcagctcgattcttcgactacttctttggaatgaccgtttcagtcgcaaaatcttgtgtcgccacaggcccatcagatatgcacgtttctggaaccacctggtcgcaacttcgaccacaccgcccaaccaccgaatggtttatgttggctgcgtacgcagacacgtacattgcccgcccgttcgacagcttccaacgccttttaggcctaggaatagctggaggatttggaaatgcaaaattcgtccaattcttcagttacttccagtctggctacgattgcagacatggtcctaacattttaaactggaacaaacttcgttggcttgaacacgctttcaacataaccgagttaccgcttgtttacaagcagggttcgcgcacccatacgcgccttcgcctcctggctacttaa

SEQ ID NO: 1478 - DNA, 1359 bp, Erysiphe necator associated partitivirus 9
  source 1..1359: mol_type = other DNA
atgtcagatcgagttgtatctgtacgacaatacttaaatactaagtataacattcgtatgatcgacaatcagtttcccaagtttcacaacttgtacaatgagatttttcaatacaatcgtactcttgtccatcaaatcaaagaaggccatcccgctttctggaaacatggaacacccaaaccttactactggactacgcttcacgctagatcacacgtagttggaaaggacgagcctgataaaatcagagctgtattcggcgtaactaagctactcctgatgatcgaaaatatgttcatctggcctatgcaagccttgtacttaaacgatcctaccaaagggcgactcctatggggacgagagatgatccgtggtggttggaagaaactcttcaccgagatccacgagaacggcaaaccaagtgcatttttatcactagattggtcacaatttgacaaacgactattattcgaacttatcgatgaagtccattcaatctggagatcgtacttttccttctcacgttaccaaccgacctcattctatcccaatgcaaaccctcgagacccacagcgtcttgagcgtctatggcaatggatgtgttactcagttaaacacactcctatccgactcccgaacaacgaactctggagctggaattacaacggattctcttctggttttcaacaaactcagttgatggattcattcgccaatatgattatgattctgacagcgttatcgtcgctaggaatcaatatcaaaagtgaacacttctggattcgcgtccaaggtgatgattcactaatcgcattgtatgaacagatttggttaatctacggacccaacttcttaaccatgcttggagatgctgctgcattctactttaacgctaaacttagcgtcaagaaatcacaattcagtgatcgcttgaacagaatgtcagttttaagcttcttcaacgatttcggattaccgtaccgaacagacgaggacctactcaggcacctcttcttcccggaacggaatcaagacttagcacgcactgcttctgctgcgttaggcttagcctacgctgcaagcggatgtagtctcagatttcattcactttgtgaatatatctggacaaagctagtcatcgaaaaaggtttctcaccctctgaggaatcgatacaatggttagaacgcgccggtgtgtttaccgaactagacatcaaagcaatgttaaaggaggaattcccttctttcatcatgcttcgagctaatgtctggtcccacaccccaagatcagttcaagaacgagaacggctttggccaacggaacctggaactcgcggaagattttacttcctcacctag

SEQ ID NO: 1479 - DNA, 1728 bp, Erysiphe necator partitivirus 1
  source 1..1728: mol_type = other DNA
atgtgtttctcacaagatactaatcttgaacgactcggtaagcaaccgatcaatcgacgattacgccgtcaaacagaacgggtatcaaagtctgaacaaacttttgtattcaaggcaacaaagaaggccattttcaaaacttgtcctcctgacatcgctaatcaagccatcaacggctactatcgatcgcccactgataatacatcagcagaagaagatttcttcaaaacagaccagccctatcatgacatcccgcgcgatcatcattatcatagagctttacgagtagtagagaaaatgtttcgtccatctcgacgactacgtccgatcgcatttcctgatctaaggtattatccttggtcattaaacgtgagcgctgaagcgccatatcgcgaatcagacaagtggtacgagtatgtgaaacagaagcatcgcgaaggcgaagttgataatgaacgtttatcgttccacaacttatatgatgaactattttctgaaaatagacgtttaatccatttaattaaagatggagaacctcctttttggactgatgatggcaaccctatcacttacgagttcacctaccttcactcacgcgcacacatggtatcatccgacaaacctcctaagattcgagctgtatttggagtccctaagcttttgcttatggccgaaaatatgttcatctggaatctccagaaagaatacttgaatcgtcgagtcaacaaaggacctctcctttggggctacgaaacattcagaggcggttggacacacttagtttatcgtttatgcggtaagcaaataaattcaatcctttctgccgattggagtggctttgatcattacgctcttcacgagacgatcgacgacattcacaacatttggcgaaactggtttgattttgacttaggttacgaaccttctgtcagcaacaaccatgattactcacatactgagactgatgaaacaagaatccaacggctatgggaatggatgtgttattcaattaaacacacccccattaaagcagaatcaggtaacatgtatagatggagatttaacggcttcgcatctggctttcaacaaacccagctactaggctcctttatcaatgcagtttacttactgacctgtttatccgcctgcggtatcaacattgacagtgaccatttccaggcattgtttcaaggagacgattcaatatcgacttttcctgaaagagttgattttactacattcatcccaaacgtctcaaatgaagcaaagcgccgatttaacgctatcctatctgttgacaaaacgtcatacggaagatggtttgatggcatcgaagttctctcttatacatatagaggaggatttgcgattcgcgatccagcgggccttcttgctcatttactgtatcccgaacgccccaagcgcgcgaacgagatcgctgcatcctgcatcggtatcgctcaagcatccatgggaattcgatgtgtctacgacgcatgccttgatctattcacctttttagtcaaggaattaaaaatagaaccctattttcctgaaacggacgtaaataaaccattcaagtggtgggaacctaccttacggtattttccaaccttcgaagaatgcgtacttcaaaattttgaagtcgcttttcgagatgagtctattaagaaccgactatggccaacaaagcctgtaggaaacggattttattttctatcaccttaa

SEQ ID NO: 1480 - DNA, 1734 bp, Erysiphe necator partitivirus 2
  source 1..1734: mol_type = other DNA
atgtgtgatactaatcttgactatcttggaaagatttcagttcgaaaggataaacaccgattcgatcgacctattcctaagaaaacaagactacatgttcaaaagatcgttattaaagcaatttataaatatgcgacccctgaattagccgatcgcgttatcaacggataccgcagaagtgacgcatcagacgagtcagctgaaattgactttctaaagacagaccaaccatacgttgacctgcctcgcgactttcattactgtagatcgcttcgagttacggaacaactctttcgcccttcaaggcgtttgaaacctatttcgttccctgaccttcgttactatccctggactttaaacaccagtgctgaagtaccttttacaaactctaagtattgggaaggaatcattcgtcagaaacaatctgatggagacatcgaagatggagcaacttcatttcataatttatacaatgaagtatttcatatcaatcgcaaacatgttcatattattaagagaaggttaccacctttttggaatacgaacggagaaccagaaccttatctttggtcctctttgcatactagagcacatttagtcaaatctgaaaaccctgacaagaacagagctgtgtttggagtaaccaaacttttgctcatgactgagaacatgttcatttggaacttacaaaaagaatatctcaatcaaattgtcaaatcacctatgatgtggggttttgagacagtccgaggaggatggatgaagatctggcgtgaaacacacaaagatggaccaccatcaagtgttttatcagccgattggtccggattcgaccacaaagtacttcacgaaattatcgatgatgtacatatcatgtggagaaactggttcgattttgatcaaggctacgagcccaccaacacctacccgaacacgacgactagaccagaacagattcagaatctttgggattggatgacctattcaatcaaacatacagctattagatgccaaagcggcaagacctatagatggaagtttaacggattagcctctggatatcagcagactcaactgctcggatcctttgttaattgtgttatgctactcacttgtctttcctcaattggaattaacatcgaagctccaacattcaaaatctttgttcaaggagacgattcactcgtcactttcaatgaaatggtattcattcacgaaacgaagccatttttactaaagctagaaaaagatgcaagacgacgatttaacgctgatttatcagttgaaaaatcatttgcaggccaatcactttccgatgttgaagtactatcgtacaaaaacagaagcggaattgcgtacagagatgaagctgagctattagctcacttattatatcctgaacgacaccgtgatttagcagccactgcagcgtcagccatcggcatcgctaccgcagctatgggatgttcccgtactgtttatgacatatgtcacgatgtttacaactttatagttaatgaactaggaatttcaccacacccacgtggagttcactggatgacccgagtccacataccaatatctattgatgtatttccttcatttcaacaaacaagcgcccaaaactggtgtcttactgaaagaagcaaatctgataataatagattgtggccaactcagcccatcggtcaaaccgatgataaaccagatggattttatttccttaatcattag

SEQ ID NO: 1481 - DNA, 1755 bp, Erysiphe necator partitivirus 3
  source 1..1755: mol_type = other DNA
atggctaccacaaatttacttcgactaggtaaagttcccagatcacgaaaattcaatcaacctctcaatcgtcgtccgcgtacaaatcggattcgacagcgtataatcaaaagagcaatctacaagatttgcccaatcgatttagcaagaaaggtgatctacggatttaagagatcacaaggtacagacgatgttgccgaaacagactttctcaggtctgatgttccctattttgatatgaaaagagattatcattattcacgagctcttcaagtttgcgaaaaactctttcgtccctcacgaacattacacccgatagcgtttcccgacctccgtttctatccttggaacctatcagtttcagcagaagcacccttttcagtagaaaagaagtggactactatcattcgcactcgtcaatcagacggtgaagatatggatggcagactgacgtttcataatctatacaatgagatttttgaactcaatcgcaatttaatccatcaaatcaaggaaggtgacaaatctttctggaatgaagacggtactccccgaccctactggtacaacactcttcacacaaggtctcatcttgttaaatcaaatgaacctgacaaattaagagctgtctttggtgttccgaaactactacttatggccgaaaatatgtttatctggaatctacagaaagagtacttgaatcaaaaaattcagtctccaatgctctggggtttcgaaacatttaaaggtggatggttaaaaatttggaacagaatgtatgctagaaaatgttcaacatttctatctgcagactggtctggattcgatcgtttcgcactcttcgagtgtatcgacgacattcatagaatgtggagaaactggtttgatttttcaaaatacgaaccaactcaagcaatctcaggtcctcctggtattcaactctcctatcccaactccataactaaccaaacaaagattgaacgactttggaactggatgtgttactcctcaaagtacacaccaatcaaaggtcaatctggccaactctatcagtggcaatacaatggtatcgcttctggttatcaacaaactcaacttattggatcattcgttaactgtatttacatgttaacttgtctatccgaattaggtattaatatagaatcagaaaactttcaaatccttgttcaaggagatgacagtctaactggctttcctgaaatcattcagcagaatgatattcctaactttttgctaagattagctaaagttgcaaagtcaagattcaacgccaatctatctgtaactaaaactacagctggtgaatccctaaataatgttgaagttctaagctacagcaatacaaatggtattgcatttcgagatgaagctgagctactcgctcatctactctatcccgaacgatttcaaactcttgaagctaccgcttcatgttgtatcggtatagcttatgcatccatgggatgctcaaaatatgtttatgacacttgtcatgacgcatattcttttataactactcaatttaaaattgaacccgattttaattatctacaggatttctttcgtgtccgaggctctcctctgaccgatgacgttcatattccgcgttttccgactagagatgaatgctttcttcaaaactttgaagttagacatcgctccgaatctgaaaaacaacgattatggccaacgaaaccaaccggtaattacggttttcactttttaaatgattag

SEQ ID NO: 1482 - DNA, 1116 bp, Flumine partitivirus 1
  source 1..1116: mol_type = other DNA
ttgactagtttttactacctaaatcaccatgcaaaagaacgacccctcttacaagaaccagacctcgtcaactttcgcctcgaacgaatttcaaaatttcgtccgaacgtacctcaggttgatcacattgcttacgcaaaacatcaacgcactgtcgaacacgctatacgcacctactgctaccctaagcagatagaagaaatcctccacggatacactcgacatgaagttaccgacgaagttgtcctcaacaatttcaaactcggcgatctccctgaacatatcacaccacgtgacaaacactacgaagtaggtctatcactcacttctgaccttttccgtccccccactcctgtccggcctgtccatatactcgacattcagcaccactacccgctgaaaaataagcccaacgctgaagcccccttctcaactgagaaattcttcacagacaagattgcccctggcctcaaagcctccaccggaaacatgaaaccaatcattttcgattacactcgacgatggcatcatgaaatcaagaataagactgaacccgaccacagacacttccactttatgctgcttcacatcaaaacagctcttaccgtgtcgacttcaatccctaagactcgcacaatcttcggcgttccaaaaccttggatcatcgcacagattatgtttttctggcccctgtttgctcactacaagtccttcaaaggctcatctcctctcctctggggttatgaaaccttcaacggcggttggatgcggctcaattacgagcttatgcatcaatacctccgcacatctatcctcatgatagattggaagaactttgataagtacgccctcttcaatgtatgcactgatatctttaagattcagcgatcatatattgatttctctcgcggctacatgcccacagttgattacccatcaactgacaaagactggaacgaagacaaagctcaacgtctcgaaaatctataccaatggactatcgacgccttcagccaaacccttgtcctcttacccaatggagaagtctactctagactcttccgcggtattccgtctggcctgtacaccacacaattccttgactcaatgtataat

SEQ ID NO: 1483 - DNA, 1068 bp, Flumine partitivirus 2
  source 1..1068: mol_type = other DNA
ttgatggccgaactcatgtttatttggcccttacaaaccagcttattgcaaagaggtgaaacctctcccatgctctggggctacgaaaccaccacaggtggttggtcccgactctacaaatgggcacaccaagtgatgcctaagtatgattttgttgctacccttgattggaaacgattcgatcgagaagcccgccatacagtgatctctgatattcacacccttatcatgagaccatactttgatttctccaatggctatcaacccactatatattatccagacacatctggaactaatcccactagacttgaaaatctttggaattggatgaccgatgcaaccttaacgaccccgttaatgttacccgacggtcgtatgttacgattcagacactctggaatctattctggttacttccaaactcagatacttgattccatgtacaacagtgttatgatattcaccattctatccagaatgggtttcgaccttaagaaagtagcaatcaagctacaaggagatgactccatcttcctgatgccctacccttacatctttcttgaaaaatcatttctccagttatttgctgattatgctcaacaatattttggctccacactcaacatgagtaagagcgaaattcttccaaacctcgaaagagcggaagtactaaaatatagaaaccatggtaccatgccgtaccgtgatgaacttgaactactcgccatgctcagacaccccgaaaggactgtctcattaccatctctgatggcaagaagcattggtatagcttatgctaactgcggaaaccactcccgtgtacaccacatttgcgaggatatttataacttcttagaaaaaggaggttatcatcccgatccatatggtctaccaggtggccttcgatatagacagaactacattcctagctacgcacaagtcgatattactcacttccctacttatgctgaaaccgttcgcctattacaagaaccggcccgcgatatgcttactgaaaagcattggcctcaacgacactttatcggtatccccggaaagtcttaa

SEQ ID NO: 1484 - DNA, 2223 bp, Flumine partitivirus 3
  source 1..2223: mol_type = other DNA
atgcctttcaacgcagttcgcaattacctactcgaacgcctgactcgcctcaaacaagaattgaaggcctaccagtcttcaaaccgtgaccctactgcgactcttgcaattagccaagatccagacttccgccgttattatcataacgttcgttatgaccctgactatcaaacgaagtttcttattcttaataaagaatactcaactctcgtcgaagcctatcgcactgataacgccctcaagcaccaaccttatgagttgcaccaacctatccctttagatgctgctcctattcctgactcacgtcaacctgcttctggaattaagttattacctctcatgtaccattatggacatgtaattcacgaacctgatgatgcgccacagacagtttcaccgtacgaaaccgctgcactgcctgaatccagctatgttaactcattcggatatccactcgactctagattatttaaattaatctatactcgttatcctgaatacttaccagtagttaacagttactgtcgacctctcggcaccgtagaagctacattttctgactttaacaaagaacagaaaccttctgacccgattgatcaatccagaaaagaagatgttttatctcatatacatcgttttctcgatacgaagccttaccttccgcttcactttgttgacacacaatactgcgatacccctctcgtaactggaaccggctatcacaaccgctattctttcaaacagaaagctcatgcgaaatattctcatcctgaagaatactcaaatctcccttcttcaaaaggctatttttataatgccacctatgagaacgctcgcaccttagtccacatgattaaactacatggattaccatccattttagattttgatcttaatgattcaagcttaacagatgaacaagttcaaacttacatctctagagccaatgatttcttcaatgactacccgacgttattgttcactcgcaaccacatttcgaaacgaacaggaccattaaaagtccgacccgtttacgctgttgatgatatttttatcattattgaattgatgcttacctttcctttgctcattcaagctcgaaaaccttcgtgttgcattatgtatggattagaaaccattcgtggttcgaaccatcacattgaacgcctagctcgctcctattcgaccttcttctcattagattggtccagctatgatcaacgattacctcgagtcataactgatatattttacaccgacttccttcgaagtttgatagtaattaacaatggatatcagccgacctatgaataccctgaatatcctgatcttgatgaacaccacatgtatttaagaatgaataatttacttacattccttcacacatggtacaacaacatgactttccttcttcctgatggatttgcttatcgccgctctttttgcggagtaccctctggtttatacaatacccaatatctcgattcctttggcaatctatttcttataatcgatgccatgctcgaattcggtttcactcacactgaaattgatgagttcgtcctccttatccttggagatgacaacacaggtatgacaaacatatctttcgatcgaatccatgacttcatcacttttcttgaatcttacgccttgacacggtataacatggtcttatccaagtccaaatccgtgcttactactttgcgctcaaaaattgagaccttaggttaccaatgtaactttggctcaccaaagcgcgatatatcaaaactcgtggcccaactctgttatccagaaaatggccttaagcctcacactatggctgcaagagctgttggtatagcgtatgcttccgctgctcaagatcatatgtttcactctttttgccaagatgtttacaacatattccgatcagaatacaaacccgacgttcgcgccaatctctttcttcaacgacaggttctacaaaaccttagtgatggaatacctgatttagcgacgcctactgtgcctgcatttccttcattttatgaaatacgagacatgtactccacctacgatggaccactgtcctatgctccaaaatggaactattcccatttcatcaatgatccagatgcatcgccacctttctcgaagactatgcgcatgtatgaagaagaaaactccatttcttctaaacctgcccctacctttgaaacggacgtgcttagcatataa

SEQ ID NO: 1485 - DNA, 1440 bp, Fragaria chiloensis cryptic virus; identical to SEQ ID NO: 613
  source 1..1440: mol_type = other DNA

SEQ ID NO: 1486 - DNA, 1614 bp, Freshwater macrophyte associated partiti-like virus 1
  source 1..1614: mol_type = other DNA
atggttactttgcagatacactgtctcagacaagctgtcgaggaaaggcatcgcgtatataatcaggatgagacagtgtatctgcaaagtaaccatttccgttcgacactcgaactcaagaggagacccttcatttatggagcgccacctaagtcacgcattgcgaagtacttcatgggccacagcctaggcttcgacattacggacgagatcgagagattgtaccgccgatcgaccatcaccgaggattccatccatcaagaagtgagagattttgatctcttcgatccgcagtacgtcaacgtcaacgaagtgacatggaagactaccatgtcagtagtcggacagatgttccgtctgaaggagaaaggacgccccctacacttgaaagatctcatggatgtagaggaggttagcgcaagtctaccctggtcacacagccctggactgccctacaccgatgccggagttcacaccaaacgtgaagcttacgacatggacgtcgacaaactccgctcccgcttgcacaacttcaagactgggaagacgcgactgttcgaactaccaccggctctagttagtgtcaggaatcatctgattctggccgacggaccggacaaggtcagaggcgtgtacgcctatcctttcgacatgtgggccatcgagacaatgatgtgctgggatctcatccaacgctacaagcaggaggagaccgcctacgctatgcaagcgacaccgttgattggaggactgaatcacatcacgtccaacgcgtacaagtatggaaacgacttttccaagtttgacaagaccatgccagagtggatcatccgccaggcattcatcatcctacgccagaacattgacctcacgaagtaccgagactggggagtacccgattctaccgccatgtacagactcatgcgcctgatcgaggactacttcatcaacacgccactcgtcaccccgactggccgtgcattccagaagaagaacgggatcccatccggatcgatgctgaccaatctcatcggcagcatttgcaacgcactctgcaccgtctacggtctacttcgcaccaacgccgctttcaaccagaaggcgtgcaaattcttcggcgacgattctgtcatcgtcttccaccgtaacgccaagcctacggactggaatagcgaagaattcgacgacgtcatttatgacagtttcggactcatcagcaactctaacaagagcaccgagagcttcggtgggacgctggaattcctaggatacacagttcaggattccaactccttgcccagaagggacatcacccccctcctggccggtctaatgtacccggagacgagagacaggtccgttaacgactttttccaacgtttaatcggcatgagctacgccggagccttcaaccgcaagttccgagaagcgtgcctacgtatggaacacaccctgcgctcgaccgatcagattgattgggtccacttccacttcaagaagtcgatttcgagaatgatgaggcagctgggtgtccccatcctggacaagccaacgtgctgtcaggaacaggatctctattccctagtacgaagggtagggatactggtcatctag

SEQ ID NO: 1487 - DNA, 1437 bp, Freshwater macrophyte associated partiti-like virus 2
  source 1..1437: mol_type = other DNA
atgtctggactaacgcgattagcggtcatcgatacgagaaccgttcgtgaacagttcaggacccacgttgatccattcattgcggaagcatttcaagctactttacccactggtgagttatctaaactcaacaattggtccagaagctattattcagttcaaggtcatattgactcaattatgaagtttaataaacctattctgcctgctccaaccaacaaagaatggcacaactccatctcggagaattttgcattatttgcaacatttccgaaagtttactctctgtcagcaaagactgactttgataaggttaagtatcaccaaggtacatcagccggatatggctaccaccttaatactcaaccaaacccgacacacaaaggcttacccaacggcccgaatcattcaagagctaagcaaatcgcttctcgaatcgtccatgaatgcaaagaacaacattctaagcataaatttcttgactatctcgaaactgttcctgataattcaaccccggatatagctttcaccagaactcaactcgcagaacttcctgaaattaaagttaggaacgtattcggcgaatgttttcattatgtgatactcgaaggtttaacagcgcaaccactcataaacatgtttatgactatagactcattctattttattggtgaagatccattgacagcggttcctaaattaattaataatttatcaactgatgacaggctcttcctatcattagattggagtgcatttgatgcatccgtccaaccatatgaaatcgaacatgcttttgatctgttaagatctattcttgtattcccagatgaagaatctgaccttgtgtttcaatatgttagacaacttttccttcgtaggaaaattgctagccccgacggttttctgtacatgcgatacggcggcattccttctggtagttacttcactcatttgattgactcaatcatcaacatgactcgaattaaatatctacttaaacgaatccacgcatcttatgatgtacttaaaactcatggtgatgacgctttagttgaaataacttcaactcatgatgatctcacacaactgattgacgaagcatcttctctagcatggcacatcaacagcgacaaaacattactcacaatgacccgaaatagattaatctttcttggtcgttcttctgttcaaggacagaattttcgtgattacgatcgttgcttacgattactatactttacagaatatccagtcaaccacccccagatatccattgctcgattaaaagcaattgacgaagattcaggatttggtattccgatgattccgaacgtttacaactacttgttgactaaatacggagatcactcaatcccactaccccgcgaatttcgacgtttttatgatgtcttttatggcaatatatctatttaa

SEQ ID NO: 1488 - DNA, 1455 bp, Freshwater macrophyte associated partiti-like virus 3
  source 1..1455: mol_type = other DNA
atgtcatttggactacgagttgttggtaacgtgaatccacgagaaccacgacctgagttcgtcacgtatatagatcccttcatagatgaagctattaagctcatcctaccagttggaatacggaacgaattagcaggttttagccgtagttattactcaatgcaaggtcacattgacagcattttgagatttgacaaacccatgcagttcgctccatccgacaacgaatggagatctgttgtgcaggattctcttagagaattcgcacgctatccgagggtatctgctctttctgctaggaaagacgcattatccttcgctcaagttcggtatcatcagggaacatcggcaggtttcggttaccgcgaaaatcccggacaatacccaacacacaaaggtcctccagacggccctaacgccaagaaagcgcgtagaatcgcttcacgcatcgtttacgaatgcaaagaagcacataaacaaggaagatggaatgaatttatagaaaatcttcccaatgattctactccagacgttgccttcacccgcactcagctcgctgagttacccaattcgaaggttcgaaacgtattcggagagtgctttcactacgtcctcctcgaggggttgttcgctcagcctctaattgaaatgtttatgaacattgattcattttacttcatcggagaagaccctattactggagttcctcgcctaatcgactctttatccgagcagtattcacaatttgtgactattgattggtctggattcgacgcgtccgtacaggtttacgaaattgatttagcctttgatcttatggaatctatcttagatttcccagatcacgataccaggttagtcttttactacgtaaaacgcttgttcatatcacgcaagttagcttcgccagacggcagactattcttacgatatggaggtgtaccatccggaagcttctttactcatattgttgactcaattgttaacatgatccgcatccggtatttatttacgcgcgtaggcatctccgtcgcattcatccgcacacatggagacgacggtttagttgttccaggtgaacacatcgaaactcttaacgatgtagtcgccgaggcaaacctcagactttggaaaattaatatcgacaaatcgaaattagtccaacttcgctcagaaattgaatttcttggcaggacatcccgaagcggagtaagttatcgagactcattaaagtgtcttagacttctactctatcctgagtacccagtggacgatccacaaattgcaatcgctcgcttgaaaggcattgatcaggattctggacatcgcgttcagtatatacctgaaatctaccgcgcccttaagacgaagtatggtgacgaagagcttcctcttcccgctaaatttcaacgatttagcttaaacatcatgaatgcatcgccaatcggaatttaa

SEQ ID NO: 1489 - DNA, 1587 bp, Fusarium cerealis partitivirus 1
  source 1..1587: mol_type = other DNA
atgaacaaatctgaagatggaccaaaaactagtcgagatgacccttgggatgcacggtttcgctacctcacagaaggaaggcttatgcctaacttcaaacgtggagttgtgcgacagatgcagatgtatgacccatacgtaaaaacggcactcgaacattttgatgatggcctgagaaaatcgcttaaaggttacacccgcagacccggtgacgaatacgctatgttagcgtcactcaagaagtatgatacacccgcttatactaagccggcacagtacaatactgacaaacgttttgcaacgtgttacgatgcagcattcgctcaagtaagcaaggacttccgattacaacacaaagttattccaactttcgttgaatctgtcgatcttgtcgaggacacgagtagtggctacccccacttcacgcgaaaatcatctatcaaagaaacaatcctcaaagaagcacgcacctacttccactatgcaaaagaaggtattaaccacacccctttccttccttgctcagtaggagttcgcggagcgctgtctgacgcagataaccccaagacccgattggtttggatgtatcctgccgccatcacagccagtgaagcagttttcgctcaaccattaattgaaaaatattatagcgaaaaagctgatctgttcctgactggtacaaatgcgagatcacgtcttgctaacttagcatcacacattgatgacgatgcaaatatcggagttggccttgatttctcttcttttgatacttttcccgtgaatgacttaattcgcaaagctttcgcaatactcgcagagaatattgagtttggctactattgggatcctgaaacaggaactcaaatagcaggcacaactgattctcgagatttcaaccgagtaaaacgacgcgcggagatagcctattcaaccttaattgagtacttcatccacacacccctgttgctaccaaacggacgtactgtctacaagcaccacggagtaccgagtggctcacacttcactaacctgattgactcaattgtaaaccgccttctcatcaagactttcgaactgtacactaaccgacggttcaaacatctcatgacaaatggcgacgattctgcttttctcgtccaccatgaaaaagccgagaatattctcgaggacgccaacgtctttttccttcattgcttcaaaatgttggttaaaccagaaaagagcgttgttgctgatctagcttctgacatgcacatgtcaggtacccgctggaatcaggccctaccctaccgccccacccaagagtggttccaaatggcactatacccgacaactttcgtcactgacgaaatgctggcattccaacgattgctaggcataggtatcgctggtgcatttagagaccccacctattgtagattctttgatttcttccaatccgcctacgactgtagaaaggataaaatgttaaattggcgaagattcaaatggctagaatatggatttggcatcgaagacttgcccaaagtctataaacagaagtcccgcttagctcagaaactacggacacttctattcaatccctga

SEQ ID NO: 1490 - DNA, 1725 bp, Fusarium equiseti partitivirus 1
  source 1..1725: mol_type = other DNA
atgcaaacagaacatttattaacaatccagaacgtttatcaacgtgctctggcgcttgagaaacggattaaactccgtgcgctatacccagatgggatagttccgtatctcaagaagttggaacatgacgggatcactgctaccccccatggaccagcggcttcagttgctccgagagtaactcaagcttacacacgtgccgaagatcgtgcacctgatgcagctaacaagtacgaatacgtaccgaaagcaaccatgatgcatttaggttggatggacagctatggttttaaccagtctattcctaagttcgatccttggtttcgcactgttctcaaatctcacgcccctactgtggctgaagaattggtggacacttacatgcgagacccgtgtacccccgaccgtgtattggaacacttctctttatttgacaaagaatggaagccagttcctaccggcaaccacatgcgccgagctaaagagctcgtggccagcatgttttctccgatgggcaaagttgaacctattgatttcaactatgctgggtggaacgaaatacttccccacctagacatgacctcttctcccggtctgccacttcgtcgagaatatcatacgcaaggtgagtgtcttggtcatatctatgacaaggcaaaacggctaaaccactttgctaaatttcttcccccttacgccgtccgtgctcctccgtgcatgataggtctccgacctggattgatacgtaaagatgagcttgatacgaaaatcaaggctcgtggagtttgggctttccctgctgaggtcaaagttatggaaatgcggtatgttattccgctcctcaaacgtatgaccgagcaatttgggaagataccttacccagttggtcgcaatatgactaaggctctgcctttcatcattgatcacttacttaacgaccaaaagacaggactagtgactgacatctctaagttagacacttcagttggaccaggctacattgaatgggcttttgatctgattgaatcttggttcgtcatgggtattacaccttcagctgacactcgcaacactaatgtgttgaagtttctgcggtactacttcaaacgtactcctatcctcctaccctcaggacaacacttgagaaaagcaggcggtgtgccttccggttctggtttcacccagatcgttgacacactcgtcacatgcttgatcacgtgctatggcttgcttcgcgctggctataccgaagaggatatccgcggccgcttgttcgtcgtaggcgacgacatggctacagctgttcccccttactttgatttggacgagtttatttattatctcgaccaacttggcttcactgtcaacaaatccaaagtaatgttttcgaataaatctatagaacttaagttcttaggttactccaagatgggtggcggtctttaccgtccagtcgacgaacttctccaaactgctatgtttccggaaaagtatgttggcaaccctgaacgttctaggcaacgtattcttggtcaagtaatcgcttcaggtttatcgaatggctttcttgccatgtcgatgcattggttatcacttttacaaggtggtttaccaatggacccaggcgaaacgtacattccacaaaaacgttggatgcgtaacgtcttaggtctcgaatcgacacccgagtcagacattgtgtttgatctcttccctctcacttaa

SEQ ID NO: 1491 - DNA, 2148 bp, Fusarium mangiferae partitivirus 1
  source 1..2148: mol_type = other DNA
atggcttttaacaacatccgtaactacttccaagagcgcctccttcgcataaaagaagaatggtcactttttcaatcatctggagaagatcccacgactactctctcaacttctgccgacctagacgtcaaacgactctattctgaacacagagataaaatttctgaagaacacgctgcccgtgcccttgaatctgaatatcaacaactccttactcactttaagaacagattagcacaccaacatcagccttttcagttctactcatctgaacagtactctggcaaccccgaagaccgaaaacctgcccccggcataatggctgtccctctaaaataccacactggacaagtcgtcctcgctaccgaacaggtccctgaaactggcttccagcttcatccgctcattcagtatcttattcgtgaaaagtatccacaatacttgcctcatcttagaaaatatgtacgcccactcggaactaccgaagctaccttcaaagattttaatcgcgaacagaaaccaagcgcatctcttccaaaagaccgccttgaccgcattttactacacgtaaaacgtaatctagatgctacaccttatcttccagttcacttcgttgacaccttctacgataaacgacccctatcaactggaaccggataccacaatcgctactcttaccgcattaacgcacatgctaaatactcagctccgcaagaatttagaacccgtccaacttcaaaaggattctataccaacgctttcgctgaatatgctcgtgacattgttcacaacatcaaaatgactggccttcctttcaaatggaactcctctcaatctgacgctaatgacaccactctcatcaaagaacttaaccgctttctgaatgaatttccaactcttctattcactagaaaccacatttcagacaaagatggaaaattaaaacaacgccccgtttacgctgttgatgaattgttctcaacaattgaatcaatgctcgcgtttccattaatttgccaagctcgaaagatgtcctgctgcatcatgtatggtctcgaaaccatccgtggctctaacatcttcctagatcaagtagcccaatggatgaaattttcatccttctttaccattgactggtctgaatttgatcaacgccttccccgcgttattacagacactttctggacacaattccttccctcactaattgtgatctcacatggctaccaaccaacctttgaatatcccacttaccctgatctcgacgaacacaaaatgtatcaaagaatggataacctactacatttccttcatttttggtataataatatgacttttctatctcttgatggatttgcataccgccgaacatcagctggcgtcccttctggactattcctgactcaataccttgattcatacggaaacctttttctcatgatcgatggattaattgaatttggatgtacagactatgacattgaacagatccttctgtttgtcatgggtgacgacaactctgggtttacttactggtcaatctctagactcgaagaatttattgaattctttgaacactattccctcaaaagatggaacatggttttatccaaaaccaaatctgtcatcactaccctgaggaataaaattgagacccttggttaccaatgcaattttggcaaaccaaaacgaccaatacccaaactagtggcacaactctgctaccctgaacatggtcctaaggacaaatatatgtccgccagggctatcggaatggcatacgcaagctgcggagaagatttaaccttctaccagctctgccgtgatgtgtattacacatttctgccgtactccgaagactaccgaaagactgaagtaatggaacacattatttcacaccttcctggtcaattcaagatgctagacgcatacgcagaaaacatcattctggatcacttcccaacgttacttgagatccaatctcttgtatccacatggcaaggtcctctcgacttccaaccaaaatggaatcgatcgcactttgttaacgatcccgatgtaataccaccatccgccaagacgatggctgactatcgacaggaaaactcgatcactgtgatcgaacctcttacgatacctccctcttag

SEQ ID NO: 1492 - DNA, 1620 bp, Fusarium mangiferae partitivirus 2
  source 1..1620: mol_type = other DNA
atggaagagtttacttcggaaccaaccaatcactacgtcttagctaaggggtctcatttaattgacgcactccaactcaagcctgcaaagcttggttcaaccactagcgaagacattcttcaaccaaactttaaagatccaaacttgaccgaaattgcaaagtatggtggatacgcaacgtattcgtctaactcgaacactgatccttgggttcgagagactttaaaaataaaggacagagagatgtacgaagacatctatggatatactcgacgcccccaaggtactccggggatgtatactgctttgaaaaagttcagtggcgagaaatgttcattcagcgatctcaaccggcaacaacaaaggtcaatgcgccgtgcaatcggcaaagcattcaaaaatttcaaactcccttacaagcgtgaacctcttgattggcatgaagtcggccagtttctgcgccgagatacttccgctggatcaacgttcatgggtcaaaagaaaggggatgtgatgaaagagatctatcatgaagccaggtggttaggacatcgcatgaaacaagatggaaagcgatctttcgatccaaccaagatgcggttccctccgtgcttggcaggtcagcgtggcggaatgtcgacgagagacgatccgaaaacgcgacttgtgtggatttaccctgcagagatgttggtagttgagggattctacgcccctctcatgtatcgtgactttatgaacgaacccaattcaccgatgttgaacgggaagagcgcccagcggttgtataccgaatggtgctgtaatttaagggagggggaaacactatatggacttgatttctcatctttcgacacaaaagtaccagcttggcttattcgtgttgccttcagtgttctgaagcagaacgtaaattttgaaacttttcgaggccaaaaagtcggaaaacgagatgcccagaagtggcgcaacgtctgggatgccatggtgtggtatttcataaatacacccattcttatgcctgacggacgtatgttccgaaaattcaggggtgtgccttccggatcatggtggacacagatgatcgactcggtggttaattacatattagtcgagtatcttgctcactgtcaagaagtagaaatccgaaacctgaaggtgttgggagatgatagtgcttgtcgagcaaacgaccagtttgacctggacgtggcgcagctcgattgtgaacctgtcggaatggtgttgaagcctgagaagtgtgagaagacgaaggacccagtcgacttcaaactgcttgggacgaagtaccgtgaaggacacgcctaccggactaccgacgagtggttcaagcttgctctctatcccgagtcttccgtgcttacgttagacgtatcttttactcgcctcattggcctgtggttaggtggcgccatgtgggatcgtaagttctgtgagtacatggagtacttccagtcttgctatccatgttctgaggaagggtggttttccaaggatcagaaacgatggctagaagttatctattcaggcaaagctccaaggggctggacgaccaagaggagtctattttggaggtcaatcttttacacttatggttaa

SEQ ID NO: 1493 - DNA, 2106 bp, Fusarium poae partitivirus 1
  source 1..2106: mol_type = other DNA
atgcttgctaacatccgcgactatttccatgagaaactcactcgccttttatacgatcacaagattttccaatctaactctaaagatcctgatctaacactcgaagcacaccactcctccgacatcgaaagaatttataaatcaattcactacgacttcaatcgttccccagctcctatcgactatgaagcacaataccaatcaatcaaacatatccttgaagataaacaatctcaacaaggctttccccacgaatattatcgtctccacgaatctccaattcctgatgacagaattcctccttccggtattaaactcctcccatttgaatacaaatcaatgaacgtcgtcaccgctactcccgaagttccagaatccggttttaaaatacatcctcgtatcgaaagactcctccgctcgaagtatccacagtatctacaatatgttcgtaaatacacacgtccacttggcaccactaacgccacagtatccgactttttcaagcctcagacaccttcacaacccgttgaacccacccgcattaatcacgttatgtcccacgtcatgaagaaaatggctattactccttatctgccactccacttcgttgatactcaatatgacaaacgacccctcgccaatggcactggttatcacaaccgtcgctcccacgagatgaacattcatgcattattttcgcatcctaaagaatacgaatccaaacgaacctccaaaggttactacgttaacgcatttcttgaatctgcccgatcacttatccactggatcaaattatacggaaatccattccgtcattgtccctctgatctcgcacaatccttacgcgaattcttccttcaacgtccaactatgcttttcacccgcaatcacatttcagacagagatggtatcttaaaacaaagacccgtctacgcagttgatgatcttttccttacaatcgaatcgatgctcacatttcctgctcacgtcattgctagaaaacccgaatgctgtattatgtacggtctcgaaacaattcgaggttccaaccaaatactagacaaaatcgcttccgactacaaatcgttctttacgatcgactggtctggttttgatcaacgcctcccctgggttatagtaaagttattcttcacagaatacatcccccgattgcttgttgtaaatcacggttacgctccaacgtatgagtacccctcataccctgacctcacaaccaatgatatggtttcccgcctcacgaatctactcacattccttgctacatggtactttaacatggtatttgtaacagcagatggattctcctacgtccgcgaacacgctggtgtaccttctggtatgctcaacactcagttccttgactcctttggaaacttattcttgctaattgatggccttatcgaatttggctctactgacgccgaaattgatgacattctcctattcattatgggtgatgacaactccgccttcacaacatggtcaattacacatttagaacagttcgtttctttctttgaaacctacgctctttctcgatatggtatggtcctatctaagaccaaatctataatcactacccttcgacataaaatcgaaactctttcatatcagtgtaattttggacatcctcgccgccctatcggcaaactcgtcgcacagctctgcttcccagagcgtggtccacgacccaaatacatgtcagcacgcgctgtcggcatggcctgggcctcttgtggccaagacaaaacatttcacgacttctgtcgcgatgtgtatcacgagtttaacgatgatcgcgccgatctagacgaaagtgcttacctgcacattcagtctcatcttcctggctacctcaagatagatgaatctgttcgtcaaatcgttgactttcaagtcttcccttcacaacaaactgtctatcatacagtttcacgatggaaaggacctttgtcctaccaaccgaaatgggatcttgctcactttgtcaaccaacctgatgtcgttccccccgactcagtcactctccatgaagtctggtctgaattaaatttcacacctcctatccttcataacttattttag

SEQ ID NO: 1494 - DNA, 2268 bp, Fusarium poae partitivirus 2
  source 1..2268: mol_type = other DNA
atgcactccctgtttactatcgttaacctcctcctactcgcccgcttccaactgcgccgcaaacgaaaagaaactaccaaaaccctcatctaccctatcagaaacattctattcgaatgggaactccgccgctccactccccgtgaacctggcattcccctccgctacttcgactactccaagtcactgctttcttacatcgaccttcaaacgtgccacaagatcaacatccacctcgatgatcacaccgatgcactaatggaacgttacgcctctcgcgacgaaccattcgccgtctaccaacacatcagtgatgaagaccttccgcccgaacgcacccccgcccctggcatccgccacgcccagtgccgctatcacgagataccctccggtactctcaacctcgacgagaaacaacacgtcctcaccgacgatcccgactttatcgaaacgcccgaattccgctctggtatattatacgatgaaacgattgacctctctggctccccgcctattcccgagattgctcaaatcattcacgactggttcccccacttcgaacctttcctcgctgaatactgccgccccccctccttcggccctcaagctttccgcgacttcaatcgtcccaccccccaccccccaccccccccacacgaacgccacgaagccatcatggatatcgtccgcgctaaattcaaccttaagccttaccggcctatgcactacgttgacgccctagccgccgaaactccgctcaatacatccgcttcctattactcgaagttcaaccccacttcccgagttttcgctcgttattccgctccttcccgctacaaagataagcctacctccaaaggctataacttcaatgtagtaatgaacgaattccgcactgagtaccaccatataaaatatgatggtgtccccttccctgctgacctccacgatcctgaagctaacgcctcgatcctcaacacatggtttgcaaaacatccctctcagttgtttattcgcactcaaatctcaaaacgcgacccaaacgatcccaagaagatcagacccgtctactccgttgacgacagatttctccacattgagaaaacacttgttgtccccgctctcgcccagctgcgtaatccgcaatgctgcgtcgcccatggtctcgaaaccttccgtggttccatgtccctactcgacagaactgcactcgtctatacgtcctatatctccctcgattggtcccaattcgatcaacgcctcccatactacgtaataatcgcctttttcctcgactttctgccctccctacttattatatctcacggctacttcccctcccgtggttatgaatccacccctcaagacatacacgctttcgcaagcaaaatcttcaacgttgtcctcttccttaccacctggtatttaaacatgacattcgtctccttcgacggttttgcatacatccgcgaacacggtggtgtaccctccggtctactgaacacacagttcttagattccttcggaaacatgtacatcattgttgactgcctgcttgaatttggatttaccccggctgaatgcctcgacatgctctactgcgtccttggtgatgataacctaatcttcgcccgtcaaaattttgaccgcatatgtgatttcatgatctttctaactaaatacgctgacacccgtcacggtatggtcgtctccatactcaagtccgtatacacaaagttacgatccaaaatctcattcctgagctatgagaacacttatggtatgcctacccgccccattggcaaactggtagcccagttatctatgcctgaacgtcctatcccggacaacagaaaatggatacacgctgcccgcgcccttggcttagcctatgctaactgtggacaagatgctcattttcatcttctctgccacatggtatacgaaaagttccgcccggatacacccgtcccctcgcttcatatcgagaaagtattcaagaaatggaaatatcagctccccgagtttgatatcgagtccgtcacctacacatttcctgactttcccacactgttttccatccgacaattagtctctgactatcacggcttcttctccgaaaccgacaaatggaacactgatatgttcgaagctcccccaagcgacaacctacatgattacgttaccctgaaagaatatatgaactcaaatgttcacatgtcccacaccgtaaacgaatttatgcatggtaagagatcctttttgtga

SEQ ID NO: 1495 - DNA, 1740 bp, Fusarium poae partitivirus 3
  source 1..1740: mol_type = other DNA
atgtgtctacaacaacctacctgcagaattcatcttggaaaacaatcaattaaccgtcgtaccaaaagatttttgatgaaacaatcaagaacctccgaacgcgaaattcgatttattgaaaagttgacgaagaaagcaatctatacgcattgttccccagcactagctgacgaagcaatcaatcactatcgccgatccgcaacggataccgaagcaggtgaaaatgactttctcaagactgatcttccatatcacgatgttcctagagactttcactataaacgtgctctcaaagtagttgaaaagatgttccgacctcatcgacgtctgaaacctattgcgtttcccgaccttcgatactacccctggactctatcgacctcagcagaagccccgtacactgaaagtacttattggcagaaccgtattgctcagaaacaatctgaaggtgatattgataatgcgagactttcgtttcacaacctctacaacgagatatttcatatcaaccgacaactcgtccatgacattaaatatggccgaacacccttctggactactaacggagaacccgtaccctacgagttcacatacttacactcacgatctcacatggtcaaatctgacaaacccgacaaaatcagagcagtatttggagtccccaaattactactcatggttgagaatatgttcatctggaacctccagcgtgaatacctcaactcctccctcggatcgtcacccctcctttggggatttgaaaccattcgtggtggatggatgaagcttttgaacaagctaactggaaaatcgtttaacaccgtactctctgcagactggagcggctttgatcacaaagcacttcacgaagtaattgacgatgtccacgatatctggcgcagctggttcgatttcgatcaaggctatgagccaacgatcagcaacacccatgattactcagacactaaatcacgcgaagagcagattgaccgactctggacttggatgtgccatgcaatcaagcatacacccatcaaagcagaatcaggcaatatgtatctgtggcagtggaatggaatagcctctggcttccaacagacccaactcctcgattcatttgttaacgcaatctacctcctaacatgcctttcctcagctggaattaacatagaaagcgaacactttaccgctctatttcaaggtgatgactcaatcactactttccctgaaatcatacccgattacaaagcatttatcgctacccttacctttgaagcaaaacgacgttttaacgccgatttgtcaccagacaaaacaacgattggaccctcacccgacgatgtcgaagtcctatcttatggtaatacctccggaatcgcaagccgatctcccgccgagctactagctcacctcctctaccctgaaagaccccgacgcgctcctgaagccgctgccgccgcagctggcatcgctcaagccgcaatgggatgttcttctcaagtattcaatacttgtcaagacgtctacaactttttagttaatcagataggagtcaaacccgagtggaaagaatggtctccaaacaagatcactccctactccatgaacgtccaaaagttcccgacttttaccgaaacattcttacagaatttcgataaacgcgaacgcgacgcccatgaccgaaatctcctttggcctagcaaacctactggaaatggatttcacttcttgaatgattag

SEQ ID NO: 1496 - DNA, 1827 bp, Fusarium solani partitivirus 2
  source 1..1827: mol_type = other DNA
atgacaaatctcaacttccttcgtactctggagacttcgttcttcggctctcatgttcgagagaaatttgctgaatttcaagattttcgacttgactggctagtcaaccgagctctgagattctttgcaaaagaagaagtggatcaagcgctgtcgaatcgacgatcagaacactctgaagaggcactcatcaacgacttcatgtccttcgaacaaccgtaccatcctataccaaaggacgataactactatcgcgctgttgcccgaactaccgagctgtttcaaccagataaacctctgcatcccgtgtcgtaccccgaccttcgctactatccctggaaactcaaacccaacgctgaagcaccctggaacatcccagacttcacattcactccgactttccgtgacttagatgacgaatctgagacaccaaaactcgaggagaacctgtcccgactatccaattggatgtctgaccgcgttgtttctgtccgtcaatacttgaatgccaaatacaacattcgaatgatcgacaatcaatttccaaagtttcacaacttatacaatgagatttttcaatacaatcgtactcttgtccatcaaatcaaagaaggccatcccgctttctggaaacatggaacgcccaaaccttacttctggactacgcttcacgctaggtcccacgttgttggaaaagacgagcctgacaaaatcagagctgtcttcggtgtaaccaagcttctcctaatgatcgaaaacatgttcatttggccaatgcaagctttatacctcaacaatccaagtaaaggacgactcctatggggacgagagatgatccgtggtggttggagaaaactcttcaacgagatccatgagaacggcaaacccaatacgtttctatcactagattggtcacaattcgacaaacgcttacttttcgagctaatcgatgatgtccacaaaatctggcgaacgtactttgacttctcacgttaccaaccgacctcattctatcccaatgcaaatcctcgagacgtacaacgtctagagcgactctggcaatggatgtgttactcagttaaacacactcctatccgcttaccaaacaacgaactttggagctggaactacaatggattttcatctggttttcaacaaactcagctgatggattcatttgccaatatgataatgatcttaacctcgcttgcgtcgttaggcatcaacatcgaaagtgacaacttctggattcgtgtccaaggagatgattcactcatcgcattgtatgaacagatttggttatcctacggacctaacttcttaaccatgcttggagatgcttctgctttctattttaatgctaaacttagcgtcaagaaatcacaaattagtgatcacttaaatggaatgtcagtcttaagcttcttcaacgacttcgggttaccgtaccgaaccgaagaggacctactcaggcaccttttctttccggaacgaaaccaagatctagcacgcaccgcttccgccgcgatgggcctcgcctacgctgcaagtggatgtagtccaagatttcactcactctgtgagtatatctggaacaagctagtactcgaaaaaggtttctcaccttctgaggaatctattcaatggttagaacgcgctggtgtgttcaccgagctagacatcaaagcaatgttgtcagaggacttccctactgccaagatgcttcgagctaatgtctggtctcacactcccagatcagttcaagaacgagaacggctatggccaacgaaacctggaactcgagcaagatttttcttcctcacctag

SEQ ID NO: 1497 - DNA, 1737 bp, Gaeumannomyces tritici partitivirus 1
  source 1..1737: mol_type = other DNA
atggaaaatctgctctctttgttgtctcagctctctctcgctgctactaatctcgagttcgttcgtcatgacccaatgcatggtcgtatcccgccgtttctcaaaacgcataacgactacttcttcatcggtcaagctcttgtgctctccgccatcgctacctatgctatgttgctcgctcctggtgcctacaatcgaatccgaaaccaccaccgctctttcgctggtgaacagcaagccgaggctttcttcatgcgctacaacgtcgagcctcactcgatcgttaaggaccgcttctactggcaagcaatgtcaatcgtttccgattggtttcgccccaagaacctgatccacccagtgcactttaccgacctccgttggtatccctggaacctctcagctaacgccgaacgcccgttcagtgtaaacaacaatctcaagaccgagctcatcaagctcaaggtccaaggtctgatcgacaacgcccgaatgtcgtttcacaacttgtacaatcacgtcttcatctactgccgctcgtatattcatcgcgtcaagaatggctcctggcctaacttgcacccaatgactcttcacgtcaagccggctctcgtctccgaaggctcgatcgacaaagttcgaaccgtatttggtgtccccaaaccgatcatcttcatggaagccatgttcttttggcctctcttctcgacctacttcaccgaacagaaatctcccctcctctggaattacgaaacactccaaggtggatggaaccgcctcaactctgagtggtatgaacgctatcaagcattcaaaccgatcttcaacctagattggtctgaatttgacatgcgcgtctacttctctatgtggaaagacatccttgactctgtcaagacgtacttctgcttctgcggccgctaccaccccaccaacctctacccgagtgcttgtacttccccctctcgtctccacaacgtttgggacttcctccaacacgcctacttcaacatgatggccgtgaccacacttggcaacgagtacaaacgaaactttgctggaatgccctctggcatattctgcacccagttctttgactccttctacaatgccgtgatggttgtgactatcctcctcgctctcggcgaacctgtgtctaaggatcacttccttaaagtcatgggtgacgatgtcctcctcggacttctgaggaatatccctctccacgattgggccccttttctcgaacgcttcgctcacgaagccaagacccgtttcaacgctaagttgaactacgaaaagtccggctacgccgctaccatccaaggtgcgtccgtgctcagttactccaactggaacggctacccacgtcgcgaccccgaacaactcttggcccaactccttcacccgaagtctctccgagatacacctccccgactcatgtcgcgggctattggcatctactacgctagtgctggtgacccacgtctgcgcccgatctgtgaacacatctataatgaactcaaacaccaaggcttttccccgaacgcctacaccttcaacaaaatgtttgaccctcgctcaattggtatggacacgatcgatctctcctccttcccctcgaagacggaagtaatctcccgccttctcggtccgtctgctagaagtcctgtccttcaggctatctactggccgatggatcacttcctgctcgctccaggttcaattcttcacgaatga

SEQ ID NO: 1498 - DNA, 1854 bp, Gaeumannomyces tritici partitivirus 2
  source 1..1854: mol_type = other DNA
atggaatacctcgttcacgccttcaaccgcttgaccacctggttcaccgctccccgcaacctcgaatacgtaggaaaatattcttacgaaccgaaatctggatacgtaaaccctgtcgccctctccaaccatcaaacaactgttctccacgctatgaacaagtacctttacgaacatgagatcaaactcatcactcaagagtaccgccgttcagaaatcaacctggaaagcattctcgaagatttcttcgctaacgatgttgaagaccatgcaatcccattcgacgaacacgttgaatacggactacaatgcatgctcgacgcttttcgtcctcctcgcccctgtcgccctgtccacctgcttgacgtccaacaccattatccttacaaatggcaagttaacgccgaagctcccttctctacggacaagttcttccttgaacatcgacaaacttttggcgatttcatccaactccgcggctatgagcacatcgaccaagccgacttccgtcgacgctatggcgatcacattgacaatccgacgcttcatactgcgctcgtccctcccaaatttggcttcatgaaacaaatgatcttcgacctcacacgtcgttggcatcatatcatcaagtctgggttcaccgacctcgctaatatggccaactcgccgtatttgaagaacagattcgtctttcccatgttactccacacgaaaaccgcaatcgtcaaacgtgacgatgccaacaagatgcgcaccatctggggctgttctaagccttggatcatcgcagacacaatgttgtattgggaatacatcgcttgggttaaacttaaccctggtgtaactccaatgctttggggatacgaaacctttactggcggatggttccgacttaacagtctactattcacagctttcttacgaaagagtttcctcaccctcgattggtctcgcttcgacaaacgcgcttacttctcgctgattcaccgaatcatgcaaggcgtccgatcttttctcgacttttcgtctggctacgtaccaacagtggactacccgtcttacgaccagtggtctcacaaccatgccatcaaactagaacgtctgtttctttggaccttggaaaacctttttcaagcaccaatcgtattacctaacggtgatatgtatcgacgacgcttcgccggcatcccttccgggctgtacatcactcagctcctggattcatggtacaactacacaatgctcgcaactttgctttcagctctcggctttgaccccaaagcctgcatcattaaagtgcaaggcgatgattcaatcatccgtcttcactgcttgatccctccggatcaacacgatgcctttatgtctcgactcgttgaactggctttgatttacttcaattccatcatctccgtagacaaatctgaaatgcgcaattcccttaacggatgcgaagtattgtcttatcgcaatcacaatgggttaccccatcgcgatgagatcaagatgttagctcagttctaccacactagagctcgcgaccccacacctgagattacaatggctcaagccatcggctttgcttacgcaagctgtgctaatcacaaacgtgtcctttgggtcctcaaagacatctacgactactacaattccttaggcttctcacccaaccgagctggcctttctgcaattttcggaaattctccggatttggcgctctttccgttcgaattggatcactttccaaccgcacgcgaaattcgtcagttcttcacctctacgtcttacataaatgagactcagaatgcgaaaacctggcccacgaactggttcctcagttccccaggcgagtaa

SEQ ID NO: 1499 - DNA, 2130 bp, Gaeumannomyces tritici partitivirus 3
  source 1..2130: mol_type = other DNA
atggttctcaacactgtacgtgattatctacacgaactccgcacaaccaaaatcctcgaatggaaactcttccaaaaattcggaaaagttactcccgatcctgaatccgacacccccgatcttgacctccgccgcctccaagctggatatcgctcccccgacgaatccactttaacccaagaatataaaaatattcgcactgacacccgtcttggctttgaagtctccgattactacaaaggtgaaaactacgaattctatcaagattctgaccctgcgaccttccccgacaatcgctctccagttccaggtattatacagctccctgctaaattccacaaagaacaagtcgttaccgcaactgacaccgttcccgaatctggcttccaactacacccgctccttaaatacctcgtataccgcaagtatccacaatacatcgaacacgtcgaaaaatacactcgacccctcggtaccacagacgccacgtttgctgactttaacaaagaacagaaaccttaccctcccgtccctaccgacctcgttcaccgcattgttcccatcgtttgcactctccttaatgccaaacgcttcctccccttgcactacgtcgacacattctttacaggaatgccactacacacaggcgcttcctacttttatcgacattcatacgaaattcgaacacacgccgctttcgcacattcgaaagattactctgcacgcacaacctccaaaggctactttctcaattccttcacagaatgggcccgcattgtcgttcacagaataaaacaatttggctatcccttcgatcctacgaacctcactgaaccagagatccgctcccatctcatgaaattcttcatggaacacgccactatgctcttcactcgcaatcacatttccgaccgcgatggaatcctcaagcaacggcctgtttacgctatggatacgctctttctacatctcgaagctatgcttacattccctttgcatatcatggcccgatcaatgtcctcatcaataatgtactcactcgaaactattcgtggtggctgctctaaaatggacaacatcgcccaacacttcaagtcctatctttgcatcgactggtcatcctttgatcaacgcatgccctggattattgtagacacattctttactgtcttccttccgtcactccttgtcatttcagctggctaccagccaactcatgaatacccgacataccctgaccttactacagacacactctttaccagaatgttcaaccttctctgcttcctccgactttggtacttcaacgcagtctttacgacagccgatggattcgcttacgtccgcactctcgctggcatcgcctccggaatgctaaacacgcaatacctcgactcatactgcaatttgttcctcatcattcacgctcttttacactttggtgcaaccgaagacatgatcttcagtttctgcatcttcgtaatgggtgacgacaacgtcgtcctcacgcgctggaacattacagaactcaattccttccttcaattcttcgaagctcacgccctcgaacgctttggaatggttctctcccgccaaaagtccatcataacaactatgcgaactaaaatcgaaatgcttggttatcaaatcaacgctggccgtccaaaacgaccactcggtaaattagttgcacagctctgttaccccgaacacggtcccatcgacaaatacatgtcatcgcgcgccgtcggcatggcctgggcctccgctggaatggatagaaatttctatctcttctgccaggatgtataccatacattccttccctacgccgaaactcccgacaaagccgcaatcttgcagatccaaaaacatctgccaggcatgttcaagatgctagactccatagatgaattcgtcaaccccgaacgcttccccgcgttagacgaaattcaagctcgcttccgctcatggcaaggcgaactttcatccgacaaaaagtggtcacccgcccactttgtctacgcacctgacgtcgtcccgttatcgtccgtgactatggccgattacatgtcccaacacgacatcaagtttcccgaagtgacacaatacttcgcgtcaacaccataa

SEQ ID NO: 1500 - DNA, 1665 bp, Glehnia littoralis associated mycopartitivirus
  source 1..1665: mol_type = other DNA
ccaatcaaagatctatccgtcaagaaaattactttcttcacttgcggcctattttactacttcattagagtttggcgctttaaaaccaaacacaagaaattcgatttgagattttacaatcaacttcgaaacgtcttcttcgaatacaacgaccgacttacctcaaagccgaccgaccccccattcgtatatagtaaatccaccctcacaatcatcgataaagtgatagccacccgcttcgctcaacatcacgatgacattattgatggtatccgctcacacagaattactgttagtcacggacccctcggactctacgatctcatcgatccatccgaaatccctgaactccgccttccgaaacccggaatcctcgtacttcccattcgttatcacgaaaagtccgctggaataggctatacttctgtaggtgaaagactgttaaccaatgaccctggtgcagcagaagaaccactcgaccgaaaggccgaaacttacgttgttgacatcgacctctcaggttttcctccgaatcctgaaattgccgaaatcatctacaaatggttcccacaatatctaattcacttagattactattgccgcccattctcatttggaccccaagccttttacgattttaatcgtactaccgaaaggaaacccgcccccgacccctcccgagaaacagaaatcctcaaaattgtcgaacagctttttaacattaagccctaccgaccaattcactttgctgaaactctcgcatctggcattcctctcaacacatcagcccccttcgctgaaaaacatgatcccgaatcaatcgctctcgcacgatggaattctccaagtccctacgctgaaagaccccactcaaaaggtcatttcatcaactccattctaacctttggacgtcgaatccttcacaacatcaaagaaactggcacccccaatgccgatcaactctccgatgccttaattatcgactcccctgaacacgcacgactccagaacttcttcatccgcaatccgaccgaattattcatccgcactcaaatttcaaaacgcgacccttccgagccaaagaaaatccgaccagtatactcagtatgcttactcttcatcctctttgaaattatgctcacctatcccctcctcgcacaactccgaaatccagaatgctgtgtcctacatggactcgaaaccttccgtggaagcatgcacgtcatagacgcctgcgcaatgcacttcacgtcctacgtttcactcgactggtcacaattcgaccaacgactaccgatctacgttatcatttgctactacacgcgctttctaccgagacgcatcgcaattaacaaaggctacaccccctcacactcttacccagacacacgttttgataatcccgatatcttcgcaatcaaaatatttaacttattacaatttatcctcttatggtatttgaatatggttttcatctcatttgatggttatgcatatgtccgcctcaacggtggagtaccctctggtcttttgaacactcagtcaattgattcatttggtaatgcttacataatcgtcgattgtatgttggaatttggcttcacaaagtcagaaatcttaaacatgctcttcttcataatgggtgacgacaacatattcttcgcg

SEQ ID NO: 1501 - DNA, 2106 bp, Grapevine associated partitivirus-1
  source 1..2106: mol_type = other DNA
atgctaccaaagatccgagactactttcacgaaaaactcaaacgcttattgttcgaccataaaatcttttcatcccaacatgaagatcctgaacaaactgccgctcgacacgcctcctccgatattgaaagaatctacaaatctattcacaactacgcgcctcaccccgacgtcatccacgactacgaagcacaataccagcacatacacgatactctcgttaccaaacaatccttatctggatttaatgctgaattttaccgcttaagaaccgatcctgtccctgacaatcgaattcctccctcaggtattacactcctccccttcgaatacaagtcaatgaatactgtcaccgcaacgctcgaagtccccgaatctggatttcacattcatccgaaaatcgaacgcctcgtccgctcaagatacccacagtatcttactttcgttagaaaatacacccgccccctcggcaccaccgacgccaccgtcgctgatttctttaagcctcagactccctccgctcccgttgaacccgaacgcatctctcatattatgactcatgtaatgaagaaaatggctattacgccttatcgtcctctacactttgtcgatactcaatatgacaagagacctctacatactggcactggctactttaaccgccgttccatcgtacaaaacgttcacgctatgttctcctacccgaaagaatatgaatcgaagccctcctccaaaggttactatattaatgctttccttgaatccgctcgatcgctcgtccattggattaaatccaccggaacacctttccgtcacgcaccttccaacctcgctgactccttacgaacattcttccttcaacgtccaactatgcttttcacccgcaatcacatctctgatcgtgatggtaatttaaaacaacgtcctgtatatgcagtcgatgatctattccttacaatagaatcaatgctgacatttcccgctcacgttatcgctcgaaaactcgaatgctgtattatgtacggctttgaaactatccgtggctccaacgccgccctcgacaccatcgctcaatcatacaagtctttcttcacaatagactggtctggttttgatcaacgcctcccctgggttattgctgttctgtttttcacagaattcattccccgattgctcgttattaatcatggctacgctccaacatatgagtacccctcatatcctgacctcacaaccactgacatggtttcccgcctcaacaaccttcttacctttttatccacttggtattttaatatggtttacgttactgcagatggctactcttacacacgccacctagctggtgtaccttctggtatgcttaacacgcagttcctcggctcattcggaaatctagtcctcatcactgatggtttaatcgaatatggttttaccgaccatgaaatcgacaaccttctcctatttataatgggtgatgataactctggttttacccactggtcaattgcacgactcgaatcattcatacaatggtttgaaacctataccctccatcgatatggaatggtcttatctaagactaaatccgttatcactgtcctacgacagcgaatcgaaactctaggttaccaatgcaattttggacacccccgccgccccatcggcaaactcgtcgctcagctctgctatccagagcgtggtccacgacccaaatacatgtctgctcgcgcagtcggcatggcctgggcctcgtgtgctcaagacaagacattccacgacttctgtcgcgatgtctattacgagttcctcgatgaacgagaagaaattgatgaaactacctacggtatgttacaatcttatcttcccggctatcttagaattgatgaatctgtccgccagacgatcaactttaatgagttcccctcacttgaacatgtgttctccacagttcgaaaatggaaaggacctttgtcctaccaaccaaaatgggatttagctcatttcgtctaccaacctgacgtgattccacctaattcacaaactttgcacgaatattggcaattacacaactacaaaatgcctattctatacaatctcttttag

SEQ ID NO: 1502 - DNA, 978 bp, Grapevine associated Partitivirus-2
  source 1..978: mol_type = other DNA
agtttatttccttcttcattttcgaaaacaatacatgaataaaaatgtaatttacgatgaccctgtcgatgcggttgaaccgtttcttggtgacaacaaagaaacgtttctactctgggatgctagttcttcatcccgttcaagagttaccgctaacaccgactttatagaacagcccggcctaaaggagatagctcggtatggtggatactccacatactcagctcctggtaacacagatccttgggtgcgcttggcactaaaaatacatgaccgtgaaagatatgatcgcatctacggtttcacccgacgaccagctggtctcgagggcatgtacaaagcactgttccgcttcggcgaacaagttaacgaattcaagagtttatcttttgatcagcgcaattgtatgcgctcagcaattaaatccgctcgctcagctttccgtttaccggttaagcatgaacctcttgagtgggaagaagttggccagtatatgcgccacgacacttcagcaggagtgaccttcccaggcaagaagaaaggagaggtggctgctcagatttacactgaggcacgttggcttggacaccgtatgaagcaaggaggtaaagagcgatttgatccgcgtaaggttcggttcccgccgtgtttggctgcacagcgtggacacctgtctccgagagatgatccgaagacacggcttacgtggatctaccccgcagagatgttagtcattgaaggcctttgggccccagtgatgtaccatcaattcatgagcttgcccaatgggccgatgctatgcgggaagagttcacaacgcttgtataccgagtggattgtgaattaccgagaaggggagaagttgcacggcttggacttctcagcatttgattcaagtgtaccacagtggttaatccgcactgcatttgacatattgcaccaaaacgttgactggttgaattggcgtggtaaacccac

SEQ ID NO: 1503 - DNA, 1272 bp, Grapevine cryptic virus
  source 1..1272: mol_type = other DNA
tcttttttttctcgcccccgccgttggcaccacattatcaaaagtggcttcaccgactctacaggtctagaacacactacttactataaacagcgttttatatttccgatgttactccactccaagacagccattgtcaaacggaatgaccccgacaagatgcgaaccatctggggatgttctaaagtctggattatcgcagacacaatgatttggtgggaactcatcgcatggatgaaactcaatagaggatcatcacctatgctatggggctacgagaccttcacaggaggctggtttagacttaacgctacactattctcccaatacactcaaaggtcttacgtcacaattgactggagccgtttcgacaaacgcgcttaccactggttaatgagacgaatcctacttaagaatcgcgattacctcgacttctcacaaggctatcttccaaatacatcctaccctcgatccgaaggctggaactctaacaagagtaccgctctcgaccgcttgtatgactggtcgcaagaaaatcttttcaatgcacctatcgtactacccgacggcagaatgtacacgcgcaactatgccggattaccatctggtctatacaccacacaacttctcgattcatggtataactataccctgctcgccatagtactcacgtacttaggctacaatctagagaaaagtatcatcaaggtacaaggtgacgactcgattatccgattagctatgctcataccccctctcgaacacgaagattttttacttagaatgcagtcaactgcagatactctactccatgccaagctctcacttgacaagtcagagatacgtaaccaattaaacggatgtgaggtacttagctatcgcaaccaccacggcttaccgtatcgtgacgaactctcgatgctagcgcaattctaccatactaaagcaaaagatccaactccggagatcacaatggcgcaagctattggcttcgcttatgcagcttgtggacaccacagacgcatacacgaaatgcttaaaagtatatatgaatattacagaaaacaaggtttcagccctaacccagctggactcaccatcgttttcggcgacagcccagacagacccagtctgccattcactgctgatcgcttccctacactagctgaaacacgagcttacttaatggacaccgactatcgcaatgcggaacaagatgccaaaacctggcccttaacctacttcttgtacccgccctgctctcggccctaa

SEQ ID NO: 1504 - DNA, 2142 bp, Grapevine partitivirus
  source 1..2142: mol_type = other DNA
atgtctatccataaactacgatcttatcttcaagaacgtaaggaacgaatcaaattcgaatggcagcgatttcaaacatcccgtgatgcttcttcgccacctccgagtcttaccgattcagacatccgcagacacttcgagaaccaacgtgacagacaacaagaatttgactcacaccttgtcctagagcatgaatttaacgctatcaagcataccatgcaattacaaaatgacacggcccgtgaaccatttgaattcacaagcacgcaaagtttcgaacgatttcccgacaaccgctccccggcttctggaattattggagttcccaaacgctttcattctggacaacaagtgaatcccaccgaatcacttcctgaaacaggctttcaagttcatcaccttttaaggtatctacttaggaacaaatatccaacgtacgaatattacgtcgacaaatacgtccgtcctcttggcactaccgatgcaacttttattgacttcaaccgtcaacaagttgagactgcaccgatctccgacttccgaaaggatcgagtactcacacacatgatgaaacgattgaatgctaccccattccttcctctccatttcgtagatactcaattcgctaaacttccacttcacactggaactggttattttaaccggcactcttttcgatcccgagctcacgccaaatactcgcacccacctgagtacgctcaaaagcagacatctaaaggctatttctacaatgccttttacgaaaccgctcgcaccgcaatccaccgaataaaagaatctggtctaccatttacttttgaatttcgtgacgataaaacagacgacgagaacttcgaaaatcttgcttccgcactcaacgcattctttgacaaccatgccaccatgcttttcactcgaaatcacatctcagaacgagacggaatccttaaacagagacctgtctacgccgttgatgacttatttctattaattgaagttatgttgacattcccgcttcttgtcatggcccgaaaacccgaatcatgcattatgtatggtctcgaaactattcgtggcgcaatgcactacatagataggctggcacgcaactatgattcctatttcacaatagactggtctcaatatgaccaaagaatcccgcgctccatcactgacatctactacactgactttcttgaacgattaatcgttattagtcatggatatcaacctacctacgagtacccctcctaccccgatctcacagctcagtcaatgttcaataaaatgaacaacttactgcactttttacatgtgtggtacaataatatgacttacgttaccgctgatggttatggctaccgccgaactaccgctggtgtaccttctggtctatttaatactcaataccttgattcatttggaaatcttttccttataatcgatggcttcattgaatatggttattccgatgaccaaattgacgacattctgctgttcattatgggtgacgacaactctggttttacgcacataccactgttcgacctcgagaaatttctcacttggttcgaaaagtacgcgctcaaccgatacaacatggttctttcaaagaccaaatctgtcatcactgatatacgaggaaaaatcgaaatgttaggctaccaagctaactacggtcaacctctccgcccgatcggcaaacttatcgcacaactgtgctatcctgaacgtggaccaaaagacaaatacatgtcttaccgcgcgattggaatagtatatgcgtccgctggtcaagatgttgaattttacaaattctgcaaagatgtttatcatctattcttaccattcgcagctccaccagaagatataaagttatcccactttcaatcttacttccctggctacctccgagcactggacacacctgatgagtttttccaaattgatcacttccccacaatctgggaaatccgacacgtctattctagatatgctggacctctcgattatgcaccgaaatggaattatgctcactttatgcatgatcccaacgtgatcccaccttctgctatgactatggctgaatatcgtgaattacacaaaattccgagacttcaaactcctagtttcatgcactaa

SEQ ID NO: 1505 - DNA, 822 bp, Grapevine-associated partitivirus 1
  source 1..822: mol_type = other DNA
atggaagagttgctctatgttcccccttctatcgacaacgttgtagaggagtccctttcgctagacgactccaccttgactccttctaacaggacgagaggtaccagctacgatgtgatcccccccaacttccaagctccttgcctgcgtgagatcgcaaggtacgggggctatggcgtgtactcaggtcagtccaacaccgacgcctgggtgagaacgtcactcaaagaatttgaccgagaggtgtatgaccagatttatggtttcacgcgcaagcccgaaggtgtgcctggaatgtataaatctctgttaaaattcgcagacgacaagaatcagtttcactcactgaaccgtgttcaacggcgcagtatgatcaaagcgatcggtgaagccaagaaagccttcaaacttccgtggaaacgggagccacttgactggcacgaagtgggacagttcatgcgccgtgatacggctgctggcgtcacatggatgggccggaagaaaggtgatgtgatggaggatatctatcacaaggctagatggcttgggcatcgcatgaaacaggatggtcgtggttcggtcgacccacgtgcgatacggttccctccgtgtctagctggtcagaggggtggcatgtccgaggcctcggaccccaagacccggcttgtgtgggtgtaccccagtgagatgttggttgtggaggggcagtacgctccacggatgtaccatgatttcatggcgaatccggaaacaccaatgttaaacgggaagtcggcgcaaaaactttacaccgagtggtgcgtcggattaagggaaggcgag

SEQ ID NO: 1506 - DNA, 895 bp, Grapevine-associated partitivirus 2
  source 1..895: mol_type = other DNA
atgaatctcattaaacttgcttacaacattggaaacaagatcatctcatatgcacctcaaaatgcatttgaagagttcaacgctttccgacttgactggctaatcaacagaacactcaagttctactctcaagaagaggtagacaaagttttgctgaatcgcagatctagctcaacaagtgatgcagtcatcgaagacttcaaaacattcgaacaaccgcaacacatcatcccaaaagatgacaattacgttagagcagttcactgtactcgccttatgttcaagccgaaacacacgttgttcccggtctctttcccagatcttcggtattatccgtggaatctgaagccaagcattgaagcaccctggaatctagacacgttttcattcactccaacattccgaaatttggatgaggaatctgaaacacctaagatccgcgaagacctcgcacttctaatgcaaaaagttacacgtacaatcaaatggttatggcatggccgaattcgagtcagcgattacctacgaatgaaacaagcaattggtatcattgataacaatcgacgcacgtttcacaacttgtacaacgagatttttcaatataatcgaactcttgttcaccaaatcaaggaaggatccactcgctttttcgaagcaaatggaacgccaattccctactattggaacacactgcacgcacgtgctcatgttgtttcaaaagatgaacccgacaaaattcgagccgtttttggagctaccaagcttttacttatggtcgaaaacatgttcatttgggcacttcagtcaatttatttaaatactgaatctggcaacctactttggggcagagagattatgaaaggtggatggctaaaactgttcaatgaaactagct

SEQ ID NO: 1507 - DNA, 2244 bp, Great lobelia partitivirus
  source 1..2244: mol_type = other DNA
atgcctttcaacgctgttagaaattatcttgctgaacgcctaattcgtgttaaacgagaatggtcgattttccaatcgtccgaccgcgatccttatgcagcccgtgaacattatcacgactctgacttacgtcgttactatgataacacccgttataatcctagcaacgagcttaaaacccttgccttaaacaaggaatactcaacgttagtccaagcatatttgaacacaaacgaattgaagcatcaaccctacgagttacatcaacccctcccagttgacattgctcctacccccgcttcaagaattcctgctccaggaattaaacttgttccactcatgtaccattatggacatgttatacacgcgcaacctcgaactcaacgcttaaatgactccagcattatttcaatcaacgatgaacattctggtgatgaaggataccctcttgacccgagactttacaatctcattacatcaagatacccacagtatctgccaatcatcaaccgttattgccgacctctcggaaccaccgaagcaaccttcgctgacttcaacaaggcacagaaaccatctgtaccaattgatgatgatagaaaagaccatgtcctacgactgatccaccattttctgaacatcaagaagtatcgtcccgtccacttcgtcgacacccagtactgcaagactccacttgtcactggtaccggttatcataatcgccactcttttaaacaaagagcccatgcatcctactcaaggcctgatcaatatgctcaacgccccacatccaaaggatactactacaatgccacttatgagaatgcccgcacattgattcactacattaagaagaatggccttccctcaagccatgactttacccagtcaagttctgatttatcagatgatgacattcaactatacattgatgtcgcaaacaacttcttcaatgattacccaacgttgctgttcactcgcaatcacatctcgaagcgaactgaaaacctcaaagttcgccccgtttacgcagttgatgatatttttatcatcattgagctcatgttgacatttccgttgactattcaagctcgatctccctcctgctgtattatgtatggcttagaaaccattcgtggttccaaccattacattgatcaacttgctcgctcatattcgaccttcttttcactagactggtccagctatgatcaacacctccctcgtgtcataactgacatttactacactgactttctccgaagcttaattgttataaatgaaggatatcagccaacatatgaatatcccgcttaccccgatcttaatgaacataaactttacacaagaatggacaacctgctccatttcttacacacatggtataacaatatgactttccttctacctgatggatttgcatatcgaagaaccttttgtggcgtcccttccggactgtacaatactcagtttctcgattcttttggcaatctttttttgataatagatgctatgatagaatttggcttctctgatgatgaaatctccaattttgtcctccttgtcctaggagatgataatactggaatgacccgcattcacatcagcgttattgataagttcattaaatttcttgaagcttacgctctcaatcggtataacatggtgctttctgcatcaaagtctgtactgacgaccttacggtcgaagattgagacccttggttaccaatgtaactatgggcatcccaagcgtgacattaacaagttagtggctcaactctgtttcccagaaacaggtttgaaaccacatactatgtcgtcccgcgctataggaattgcctatgcgtctgctgctcaagacatgatctttcactctttttgtcaagatgtttacaacatcttcagagatgattacaagcctgatcttcgcgcgaatctctactaccagcgtcagttcttccaagaccttgaagatggtattcctgatctcgctactcccgtcgtcccacctttcccatccttttttgaaattcgcagtgcttactccgaatacaaaggccctctcacttttgagcctaaatggaacaaagcacatttcatagatgacccagatgtcacgacaattcagtcaaaatccatgcttgactacgaattggaacataaaattccacgtagaatagctccaacttttgaaacggttgtacctagtacactgaattttgctgatgctacgcctagctag

SEQ ID NO: 1508 - DNA, 2148 bp, Grifola frondosa partitivirus 1
  source 1..2148: mol_type = other DNA
atggcaaaccgcacagttcgtgatttcttagctgaacgaaagctaagaatcgtagaagaatggaagagattccaacagtctcttacctctacggaagaacaggcccccatcgacgactcctcagacatccgcaggatgtatcagagtttcagagattcactatctgaacagcaaaaaactgctgtacttgatagagagttccagagtctaattgactccatgcttctcaagaacaatgagaagaaggaaccattcgaattctcttctgatggccaatttattggctttcctgagaaccgacggcctcaacccggtatcgctggaatagaacgaaagttccacaccggccaaattgtgtctacttcagatgaagtacccgagcctggatatccgctcaacccgattatccgtgatttgatcacaatgagatacccgctgtacctcaaattcgttgataagtacgtccgaccactcggaactaccgacgccacattccgtgacttcaaccgtgaacaacggccttctgcccctattgatccagaccgtaaggaacgtgttttaaaacatgttttcaaacgtctgaatgctactccttatttaccgatacattttgtagatactcaattcacaaaattaccgctacacacaggaactggatacttccagagacattcattttggattcaatctcacgctaaatattctcgacccgatgaatacagagatcgacccacttctaaaggatacgttatcaacgcattcctattattagccaggactcacatccacaagataaaagagactggactccccttcgattttaacctcgacgatattgacacagatgatgataaattcaacaccttaatccgatatctaaacaaattcatcaacgaccatgcaactatgctattcaccagaaatcacatttctgataaagatggcattctaaaacaacgaccagtatatgctgtggatgattcattcatcctaattgaagcaatgctaacattcccattattagtaatggcacgtgattcaacttgttgtatcatgtatggactcgagacaatacgtggtggtatgtgttatattgataggatcgcaagatcttacaattcatacttctccatagactggagccagtacgatcagcgtctaccaagatgcataaccgatatatattacactgactttcttgaaagcctaatcgtaatcaatcatggttatcaaccagcatacgaataccccacttaccctgacctcaccgaagatgacatgttcaataaaatgaacaatcttcttcaatttcttcacttatggtataacaacatgaccttcgtcacagccgatggctatgattatcgccgtacatgtgctggagtaccctccggactgtacaacactcaatacctcgattcatttggaaatattttcctcatgattgacggccttattgaatatggttgcacagatgaagaaatcgacatgatattattatttgtcatgggtgatgacaactcaggaatgactggatggcttctttcgaagcttgaagcgttcataattttctttgaagactattctcttctccgatataatatggtactctcaaaaacaaaatccgtcattacagctatccgtggaaagatcgaaatgctaagttaccaatgtaactatggcagaccgctccgccccatcggaaaattagtcgcccaactatgctacccagagagaggactattctataagtttatgtcctaccgagcaattggagttgcctacgcagccgcaggaatagaccctacttttcataagttctgtcaagatatttacactatcttccttccttttgcagccgaacagtcaacgttcaacttcaaccgtgcatcctcgcacttgcctggctatctcaaagcattcgacgaaataaccacaatcattgatttcaccaaatttccaactatcttcgaagtccgaagagtatacgatcattatcatggtcctctgacctacgccccgaaatggaactttgcccacttcatcaatgccccaaacgtgatacctccatcagccaaaacgatgagccaataccgtaaagagcacaaaatcccccgctctgaggtcccaagcttaccaattggttaa

SEQ ID NO: 1509 - DNA, 1800 bp, Grosmannia clavigera partitivirus 1
  source 1..1800: mol_type = other DNA
atgttgaacctcaaggtgataggaaagtatcccgccctaggaaaacccatccatggacatggagataccgaatcttctatccgcaaagtcacggccgatattatcgaccatgctctccgcaagtttctcagtcctgaagaagccgaccaagtcattaatggctatcgtcgctctgaatggaacgaaaacgccctcaacaaggatctcgagaagttgaactctcgcgaacacatcgtcataaaagacgaacactactggaatgctattaaccatgtcaagtcgcttctaacccctgaaaagccactccaacctgtgcacttcgctgatctccgccattacaagtggaatctttcaacctctattggtgccccattcgctactagcgaaaagtggaccagctacgtcaaagcaaagtacaactttgccaaacgtggaattccttttgaatctcgcgcccaccgtgatctcttcacggaagctcatcagacttctgaacctctagaaattagagacgcaagaatgaccaagcataacctatattccgaggccttcaccattacccgtaagaacattcaccttatcaaagaaggtagaacgcacaacgaaaaaggacacgacctccgttactggaacactgcctttgctcgtcgccacctcgtctctaatgacgaagaagacaaagttcgcttagtctttggcgccccgttcactcttctctgcgctgaactcatgttcatctggccccttcaagtgtttctcctaaccatgaccggcccccacgccttcatgctctggggttttgaaaccatacttggcggatggtacagactgcgcaacttcttcgctcgatatgctcctcacgctgaggcagtagttactatcgactggtctggatttgaccgatacgcccgtcactctgtgattcgagacgttcactcccaaattatccgacccatgttcgatttcacacatggctaccaccccaccaagcattatcaacatcacgaagaaacgcccggtgaaaaaccttactccgaaagactcgagaatctttggaactggatgacagactctgtcttatccattcccctgatgctacccgacggaacgctctgccgcttccaacactctggtatcttctctggatatttccaaacgcaaattcttgactccctctacaatctagtgatgcttttcacgatcctctcccgaatgggatttgatctaaagaaagtcgtcatcaaagtccaaggcgatgattcaattttcaaattgttttgctgctttattctgattgttaactcattcatgactctgtttaagcactacgctcaaatttactttggagctgtggtcaatgacaaaaagtctgatattcggaacactctcgaacacgctgaagtactcaagtaccgcaacgctggaggtatcccctcccgagatcgcatcccgctcctggcacaactccgacatccggaacgctcatccgctcctgaaaacgtcgccgccagagccgttggcattgcctacgctgcatgcggacaagacccacttgtctacatgatttgcgaagacatctacaccttcctcactaccaagatggaagtaaccccgcgtcaacgcgaattagacacgatgttcaaatacatcgatagttcattcgaggacctaccacacacattttctgctgctaagtttcccacatttaacgaaacgctgcaacatttgatggacggtccaaaaccactctcccgcgcccattggcctgagatctttaatggtcttccaggtcgtaactga

SEQ ID NO: 1510 - DNA, 1716 bp, Guiyang partiti-like virus 1
  source 1..1716: mol_type = other DNA
atggcggaacgcgcagaaacatcgcgcgtgattgtcaagctacccagacgaggccctgggtatgcatttgatctgactccgagtcgagtagatcctctcgcgctccgtgctgtacagcacgtcttcggagcagaggttgttggtagtgcattctcccgaatgcataggtccaccctctcctatgatgcgctgatgagtgactttaagcagtacgagcggctttatgcgccgtctgcgccgatccgctccagtcatatctatcagatgaccatccaatctgttagagatgacctgtctcgaagggagaagctgatccctttgacgaccggagcagtggtggggcttagcgactttccgaaggctaagtctccgggtctaccatggaagcacctcggatacaataccaagggcgatgttgttgcgaacccggagaacgttgcagaaatgcgacgcttctggcagcacatcggcgctggtatcccccgcgattttcctgatacctgtttgtttgctcggacacaagtgtgcgacgtaagcaagcagaaaattcgcagcgtttggggataccctttgcatgtgtatatggaggaagcccggttcttctatccattgatggactggttgaagactggtactgaccacaagctaccgattgcctacgggtacgaaatggcacacggaggcatggtagctatttcggaattgcttgtccgttcgggagaaggttcgctcgcggtcatgactgactggagctccttcgacaagtcaattccaccgtggctaatcagggacgtcttcgatcttctctctgaagttttctccttcgaccaagtacgcgacgtggaaggtaaggtctggcatgtccgacctgaccggacatggcgccgttggaagaagatggttgattacttcattgagacaccggtccgcacatgcaaaggagagcgttttctagtacggggaggggtaccgagtggatcgtgttttactaatattgttgacactattattaacacgatcgtaactcgcttcctgtgctatcaaacccttgggttctatccgagtggagaaatgtacctgggtgatgacggggttgtggcattgccccccggttccatggtagatctggatttaatggccgagatagctgccctcaagttcggaatgactttaaatcgaaataaatcatatgtcacttcgaacattgagaatattcatttcctcggctattataaccacccgatcggtagaccacatcgtgaccaggacctactcatcgtctctttcgcccatcctgaacgtacacgtcgtacggcggaagagtgtgctgcagccgcactaggacaactatgggccaattttgacccatacttggcttatcgatggtatgaggtccttatgtactgctgcgatgagttttgtttggacacggacgttgtgctcgcacacctccgcggccacgctcatcggcataagtacctgtcacatgtgggaagaaatgtagcagctttgacggttccgacgcccaatgaagagcaccttgttctcgctgtcttggcttccactatccctaaacgtgtgccggctcgtcgtgagtactcgtactccgagctttgggataggacagttcgagtgtgcttcgagcgcgtcacccctcctcacgacaatcggagggaggaaccaccggatgaaactcatcagatagatcctggctga

SEQ ID NO: 1511 - DNA, 2178 bp, Guiyang partitivirus 1
  source 1..2178: mol_type = other DNA
atgagagaaaacgaaaacccacaagcaaacggtccttttaaggatccaacaatctattacaaagaaatagcagatatagctagacttgaagtccagcgatgcttacacagtaaaaaggcaaattatgccgtccaaaattttttaattttcaatttaaattttaattacagttcatgttatataaaattgtcagattatgacaaaaagaaaatcaaaacccaaattttagataccgaaagagagatttacaaagtagattcacaaaagagagagaatttcgaattctatcgaacgttaaactttgatgaagttccagaaaacagataccccgcccagggtattacattactacctttcaaatatcatacaggcagagtagttaaggctactgataagatcccagaaacaggatatttcataaaaggaagtattttaagactgattacacgatcatatcccacctatctaccaatagttgaatctttatgtagaccattaggcactacagatgcaacatttaatgatttcaacaaaaatcaggaaccaacagatgttttaaaccagaaactcaaggatcatattcttcatagacatatttatccaattttaaatttcaaaaagtacaaacctatccacccacacgacttccagttttgtgcattacccctcaacaccggaacaggatattacaacaggtacagcattgaagcaagagcaacagcgaaattacatcacccagccgtttatgataaccaaaccacatgtaaaggttattttgtcaatatcaacgaatattttcacagacagataatcgaaaacatacagaagtatggatgcattgaacctattcacaaccctaataaagaggtttatgaaagagtcaaaaacatgaaaaacaaacaatttttcctatcccatccaacgcttatgttcactagaaaccatgtgtccccctccgacagagaaggagaattaaaacaaagaccagtttattgcgtcgatgacctattcctacgaatagaagcagctttagcatttccacttttgatacaagcaagagacgaactcagtgcgataatgcaaggtttagaaaccatgagaggagcaaattgctaccttgacacaatcagccaaacatacaaaacgtatttcacgattgattacaaaagcttcgaccaaactataccactaaaactagtcacattattattctcagacgtaataccagacttagcaatagttaatctaggatataccaagaaatggggagatttagacaataaagaacaccaagacatagcccaaggctttcaaaatttattaaaatttatggaacaatggatgacagagatgacctttgtcacaggcgatggatttgcatacaaaagagaacatgcaggtattccctcaggaatgctttttacacaagtaaatgatagcatagtcaaccttttcatgattattgattctttaattgcgtacggatgtacagacgatgaaatcgaccagatgaaatttttcataatgggagacgacaattgcatttttagccaatggccaatgcagaaaattgaacgattttccttattcttacccgaatacctacatagtagatggaaaacatacacacatccagacaaaaacatactcacatcagacagaagaaagatatcaacgttatcatacgaatgtaaccaaggatatccagttagaccaatcgaaaagatggttgcacagcttgtctatcccgaaagaggatttgacgaaaagctaatgtcatacagagctataggagcagcatatgcaagttcaggatgcaacaaacaattctacgaattttgcaaagatatatacaacatgtatttaccagacagagcacctataaacgaatttaatatcaggaagatcaaaaagatgatgtaccatggatattatgatgatgaatcattcattacagacgaaatgttagaagaattcccaacatttggaagaattctatttatgcatagagcatatctcggacccctacacccaggtccaaaatggaaatttgacgttttcagagagatgccatattgtaatgataaaagaggaataactttaactttgagaaatgaagctatgaagttcctatcaccacctctttctccgagattcaattttaaagttaatgattaa

SEQ ID NO: 1512 - DNA, 1791 bp, Gyromitra esculenta partitivirus 1
  source 1..1791: mol_type = other DNA
atgcagaacattcaagaactcgctcccgatttcgagaacgctgtcccaatccgtggtaacgacccaagcaagcccaaccccttgtctacgatcactaaccgcatcattgacaccgctctccataaattcctcactcacgaggaagcgaccaaagtcatcactggctatcgtcgttcaccctggaacgaagacgctctcaaacacgacattagtaagctaaattcagccgaacatccagtcgtaaaagatgaacactattggaacgctatcaatcacgttttcaagctcatcaaacctgacgtccctcttaaacccgtccatttcgctgacttacgccaatatccctggcgactctcaaccaacgttggtgctcctttcaacagctccaaacactggcagaactatgtcaaagctaaatacgagtactttcaaaaaggtacccccttcgataacatcgcacatcgcgatctcttcaccgaagcacacaagacgagtcaaccgctagaaatcctcgacacaaggatgaccaagcacaatctctatactgagattttctacattacccgagaacacattcacatcatcaagaatggaggaacaacatcacgcaaaggccaagatctccgattttggaacaccgctttcgctagacaacatcttgtcaagcaagacgatgacgacaaagttcgtctcgtattcggcgcacctttctgcctgctcacagcagaactgatgttcatatggactcttcaagtccacctcttactcatgcaaggttcaaagtcatttatgctttggaacttcgaaactatcctaggcggatggtatcgactccgaaacttctttgcaacctacgctctacgtcatcaactagtcgcaacactcgactggcgcggcttcgacaaagatgcaagacacactgtcatcaaagacattcactcatgcattttacgtccctgctacgatttcgatcatggttatcatcccaccaaggactaccctgacacgacatacgacgaagacggcacgcacaccggcccccgaatccaaaatctttggaattggatgaccgacactattcttagtatcccactccttctccccgacggaacgaaatatgtcttcactcactcaggcatcttctcaggctactttcaaactcaaattcttgactccctctacaatatggttatgatattcaccatcctctcccgcatgggcttcgatctcgacaaagtcgttattaaagttcaaggtgacgattctatcttcatgctattatgctgcttcattatgatatgcacttcatttcttactctgtttcaacattatgcaacctattactttggcgctactcttagcaccgaaaaatctgaggtccgagactctctccagcacgctgaagttcttaaatacaggaacaacaacggcatcccataccgagatgaactctccttgctcgcccaactccggcaccccgaacgctcaactgaccctgacgctgtcgcggcacgctgcattggcatagcttacgcatcttgcggacagctaccccgtacttatcaaatctgcgaagatatattcacctatctaactcgcaagtacgacgcaacacctcgtcaatccgagctgaacttcatgttcagacacctggaacacatcgatatcaaactcgacgcatccaagtttccctcgttttacgaaaccacccgacacctagttgacggtccacgccctctggcgaactctcactggcccaaagatcacttcaatggtctccctggtcgttag

SEQ ID NO: 1513 - DNA, 1692 bp, Hameenlinna partiti-like virus
  source 1..1692: mol_type = other DNA
atgaggaatgattacgagttggatagtaatcccggatcgtgcgacgcgccgatcccgatcattcggaagtacgatgagaaccatccgtacgagttcgaatggcgagcccctccccaggtcgaaggcttgacgctgggaccagcgatgagacagctggagaaaagagcccctttccccgcttcttatttcccaccacatatcagcgtaaatgcatgctacgtatttgaccaatgtggtatgaaggcggaaagagtagagttactctcaaagtatcaacgaagctgggtcacccaagactcactaaggaaatcaacgcttggatacagccacgttaagtacgcacccgcgtttaacgattcccgtttggatgaagcgatcgagttcgttcgagatgagttcgttcacgcattgaaggaacccttgaaatcatggaccatcgagaaggtaatgaaggaaggtgacatgccgaaaaacacctctccaggactaccttacattcaacaaggctacaggtcaaaagccgacgtctggaaggatcatcaccaggacatcgaagaggagcacatccgtattcgcgaaggataccgcccacggacaccagattgtgccgcattcgcaagaagcatcgtctgcgaaaagccgaagaacaaagtccgtctagtgtgggcctacccactagaacaggttctactggaagcgaagtacgtgcaaccactcctacaagcaatgacatcccagaagattggacaaacagtcgcatatggcgcagagactatgcgcggaggcatggaatggctcaacactgagttacattcactcccaaggcagaactacatatgtatcgacttcagcagcttcgatcaaaccgttcctgcatggctcatcaggatcgcatttgatattttggaagagtgttttacaaccacggaagtagaggacgttaacggtcgaattgtcaagacaaacgatcgtgcagtcgcccgtgagtggaggcagatcaagcactacttcatcaacacaccgttaagaatggaagatggcactaggtacgagaagacaggaggagtaccatcaggatcttgtttcactaacatcgtagatagtatcgtcaacatgattgtaatgcgctatgttctaatgtcaacagcaggtgaatggccaaattttctcaccgtacttggagacgacagcgtaacagccacgacaggactagttaatctcaacgacatggcacaagttgcaaaggataaattcggcatgattatcaacgttgagaagagctactggacacagtacattggtaatgtccaattccttggttactacaatcaccacggctacccagcccgagacgaagacacgttgctcgcaggtctactactacccgattcaagtgtggacgaatcgttagcactcactgcagcaagattcctcggtatatctcaagcatcatgtggagcaagcagagcttgtataaagctgacgaagtacctgtttcgagaactcgaaagaagagggaagaattttgtcgtcgatgcacagaagctttaccacatccagaaagcaggaggatggcttcccgccgcaggagagaaaccggaaccactacccgcagtaccgttcctagaatatgctgttttaccgaaacattcgtgtgaaaagctaaagcagggcataaggctagctagatga

SEQ ID NO: 1514 - DNA, 1569 bp, Hangzhou partiti-like virus 1
  source 1..1569: mol_type = other DNA
atgtctagcgacacttttgacgatgactactttggtaaagacaatccgtctgtgtgggattatccgttccggtacattaccgagacgactcgcatttccgattttcggcgcggaatcttacgccaaacgcaacgctacgacccgtttgtagatgttgcactgaagcattttgatcctgaactccgagagagcatcaaaggatacactcgcagccccggcgatgtttgggacgttgcggaaaagttacgcaagtacgattgcgcaaccattcctcacgtcacatccgaccatcgtttcacttcagcttacaatcaagctgtacgcgatgtcatgtccgacttcaaactcgatgcccctgttgttcctcattggatcaaagatgttgatttagttaaatcaacttcgtccggttaccctcactttgaacgcaaaggagatatccttgaaaccatacttcaagaaggacgcttccactttcatcacctcaagttatacgatctcaagcgatgcccactgcttccttgtaccgtatctacccgtggtggactctccgagtctactgaccctaaaacccgacttgtgtggatgtaccccgccgctatgactgcttgtgaagcagtgtttgctcagcctcttattgacaagatttattctgagaaagcacatctgctactcacaggtgtcgattccaaataccgcatacaaaaatatctttcgctcatctccgatgatgccgaccgatgtggtgtaggaatggacttcaagtcattcgacacgctccgaagcaaccgacttattcgcgatgcttttgctgtacttaagcagaacatcaagtttggttactactacgacaagatctccggccttcagaaaggtcgctccggtgttgatgtccgtgctgagaaagccttcgacaatatcgtcgagtacttcatccataccccattactcctacccaatggacgaatggttacaaaacatcatggtgtaccgtctggctctcacttcacaaacttaatcgactccatcattgtacgcatccttatcaagacttttgcgtactacgaagactttcgaatttacgaacttcgaaccaatggagatgactccgccttcacggtgtattccgactcagctgttggtatactcgagaaagcagcagttttctttgacaaattcttcaagatgactgtttcagtcgcaaaatcctgcgttgctacggctccctccgcgatgcacgtctcaggtactgtctggaaaggtcttcgaccttcccgccccacaacagaatggtttatgttggctgcgtattccgatacgtatattgacaagccgtttgacagtttccaacgccttctaggcctcggtattgctggtggatttggtgacgctacgttcactcgattctttcagtatttccaaaccgggtacgattgcagacaaggtcctcggatcttaaactggaacaaactacgttggctagaacatgccttcaacataacagacttaccactgttgtacaagcaaggatcacgcacacacgtgagacttcgcctcctcgctgcttag

SEQ ID NO: 1515 - DNA, 1341 bp, Hangzhou partitivirus 1
  source 1..1341: mol_type = other DNA
atggcttggaaagccgcagcttgcttgtttccacccactccctacaagcgatatcgtccacgcccatcggacttccactctgcctttgaaaggtatttggaacccagtcccaagcgccccactgatgatctgtatactacagctgtgcagaaagttagtgagtggttgaacttacctaagatcaagccattacaccttaatgactctatggcgaggtttccacaccccgaaaagagtccgggacttccctacacgagggaaggtatccgcaaaaaggccgatgttccgccgtcaagagtccgctcttttgttcaccaactcaaatacggcttaattacgaacatccgaactccgtgcactgcagctgcacgtactactgtcgctacagtcgacaagttcaggcttatttgggtgtatccgtgcaatgtcacgatggcagaaggtatgttcgcccaaccacttatcgaagccttcttatcatggaggactccgtatgcgctttgggtgcaatatggcaaaggccatatgaagtggttagcttcgcagcggcgctccagacgccagaagtggatcagccttgactggtctaactttgatgcgaacgttccagcgtggttgatccgtgatgcgttcggtatcctgtatgcaaagttcgatctttctgcgtacgagggatggggtcgaccaactgatgaccatacactcccccgattgtggaaacgccttgtccactatttcatcaacaccccgatgaaatttcccggtggtgaagtgcgggtcaaggccaagggtgtaccatctggttcgtattttacgaacatcatcgatacggtgtgcaacgccatcgcatgcctgtatatattgatgaaaatgggcctacagagccatcaggtgacaccttggttccttggagacgatgctctcatgctagtcccaggattggttgatttacaagcatttgcccaatacgctacagacgtatttggttttaagctgaatgctgccaagagcagtgtgggtgatactttctcctttctagggtatggatcaaccccgtcaggcgtaccgattgcagactataacaagttgctagctcaactgttgctgcccgatgcgcccgatcgttctcttgatgatttcgtcattagagcacgagcactgcagctgtcctgcttcggtgtgggttgtcccgagttcgtgaagcttgttgacgacaccttacaagacttcccagctggttctggcacgctccacccgcgtgacgaacttgtgtataagatgcaccagttaggtttgtccgactggccgcctctcaccctagtttggtgtttggtgggctaa

SEQ ID NO: 1516 - DNA, 1701 bp, Hattula partiti-like virus
  source 1..1701: mol_type = other DNA
atgatgaatcttcaagacggacgtctcggctcgtgtgactcgccgagccccataactcgcacgtatgacagggatcacccgtatcatttcgcgtggcgagacccaccgtcagtttcacccgaagaactgattgttggaccatccttacggaggatgagtaagcgatctccttttccggcatgctatctgccaccgcgcgtaagcgttaatgcctgttacatttttgacaaatgtggcatggctcaggaaaggatcgaactactcagcaagtatcatcgcagctggatcaccaaagatacactacgctcagccactttaggctacggtagtgtaaaatacgctacgaagtttgaagatgagatactcagagaaagcgttttatcggttagagatgagttcagagataagctggcagcgccgctaaaatcttggaccgtcgaaaaagtcattgagcaaggggctttaccgaaaatgacttcacctggactaccttatatccaaagagggtataggacaaagaaggatgtctgggatgaatgcaaaactgagattatcaataagcatcaagcggttagaaagggtcaacatgttactttccctgattgtgcggcaatgtcccgatcagcggtatcgacttcagataagaacaaaacgagactagtttggtcttacccactagacatcgttctacttgagtcgaagtacgtgcaaccgctacttctagcaatgatcgaacagaaaatcggaacctcagtcgcttatggagcagagactcagcgaggaggaatgaagtggctcaatcaccagttgaataaactgcctgatatgtcgtatctgtgcctagacttctccgcattcgatcaaacaatcccagcttggctaataagaatagcgtttgatatacttgaggagtgcttcgacattcacacagttgaggaagttaacggcgaacggaagaccgacgcaataactatctcccgtgaatggaaagctattcgggactactttataaacacccctatccgaatggaagatggcactcgttttaagaaaacggggggtgtcccttctggatcatgtttcactaacctcgttgacagcatcgtcaacctcatcgttgttagatattgtattaaggccacgaccaacttctggcccagtttcctttgtgttttaggtgacgacagtgtcacagccacgctcggtaacgtaaatctgcacaacatcgcggaatgcgctaaagattgcttcggcatgatagttaatgtagaaaagagctattggacttccagcccccagaacgtacaattcctgggttactacaactaccatggctacccaatgcgtgatgaagaacctatgctagcaggcttgctcttacctgactccaacgtcgacgaatcgcttggactcactgctgctaggtttcttggcatagctcaggctatgtgtggatctagtgcgaagattgtctacctttgtaatagacttttccttgagctcaaggttaaaggtttagacatggctaatgatgctaaaaagctttaccatattcgaaagatgcatggttggcttccagcagccggagaggatgggagtgtacctcccactttgtgctgcactatcaagcaacacgactccatggaaaaatcttctaccatcagcgccgttctacgggcctatcaccctctctgggagtaa

SEQ ID NO: 1517 - DNA, 1827 bp, Hebeloma mesophaeum partitivirus 2
  source 1..1827: mol_type = other DNA
atgactaacctcacctacatcaacacgatccgccgagaaacacttccgactgtcaacccatggaatactcctgacgaacaccttcgacagagaaacgaatggcttacccgacaatttaagaagttttactccgacgaggaagttgaacaagttctgacgaacagacgttctgacttttcagacgaagcacttatcgctgacttcaaagcagcagagcagcctcgacacgtcattcctgaagataccttttttcgcaaagcgatagaagttgtcacggaacagttcagacctaaccggatgttacatcctgttcatttccccgatctacgatactatccctggaacacatcagtttcagctgaagcaccctggacaaacaaggacttcaagttcgtaccaatggaccgaagcattgatgaagagagcgaagctcccaaatttgctgaaaaaacagcaaggaagctcaggaaatggaaaaacccgactgatgttgacacttatctacagtggaaacaaaagattggacttacattggacgcatcacgttcattccataacctttacgacgagattttcatctacaatcgacccctgatccacaagatcaaagaaggagaagcaccattctggaccacagatggaaagcctttaccttacctgtggaacacacttcatgctagatcacatgttgttggacaagacgaacctgacaagattcgtgctgtttttggagctaccaagctactattacaagccgaactaccgttcatctggccactacaagcgacctacctcaacacgagagcaggaagactactctggggaagagaaatgagccgaggaggctggaagaagctactacgagagctcttctcacatggaccaccatctacattcttaggagtggattggagccagttcgacaaacgactgcttcatcaacttattcgaatagtccataacatttggagatcatattttgattttaccaaatacgaacctacctcacaatacccgaacgccaaaccaggcgatcccaaacgcatcgagcgactgtgggaatggatgtgtgcagcaatcactaacacaccaattctactaccgaacggtcagctttggacctggaactggaacggatttggctctggatatcaacagacccagctaatggacacttttccgaatgcgatcatgctttacacatgcttgctagcgcttggcgtcaatgttgattccgacaccttctgggctagattccaaggagacgactcaattgtcggctttatggaacgaatgttcacattgtttggaaacaattttctagacatgttggctgaaacagcactacactatttcaatgccaaattgaacattaaaaagtcacagatacaggaccgagtcagtggaatgacagtactcagctattctaatcgaatgggccttgccctccgaacagaacaagaccttttgagacatctgtttttccccgaacgaccccaagactacggcagactggcagcagcagctatcggcctcgcccaagcatcacttggttcaagcgaacgctttcatgcactatgcaatctaatatacgaaaagattgtgattgaacgcgagacgcaaccaaagtggaaagtactacgttggttacagcgaaccggacaagaagagattttagaaagtctgcaacatgcaggatttccaagactcacggatttgcaagctcaacgctacgcaacggttgaacgcaccgagaaagagaacgaacggcaatggcctacctacgctaccccgaacagattattctattttctcatgcctatttaa

SEQ ID NO: 1518 - DNA, 1830 bp, Hebeloma mesophaeum partitivirus 3
  source 1..1830: mol_type = other DNA
atgaacaatctcactttcctacgaaggatcggagcaatggaaatgccctaccgaaacgaatgggaacaatccgctacgtcaatggccttccgcaacgaatggctcgaacgacaaatgcgaaaattcttcacagatgaagaagttaaccaagtactgacgaaccgacgatcagactactcagacacaggactcatcaatgatttcaaggctacgaatcaaccgtaccacgagatcccagacgatgtatacttcagatcagcaatcgacgctgtcactgaacaattccgaccaaatcgagtactctatccaattcaatacccagacttgcgatactatccatggacgcttaacgtatcagccgaagcaccttggaacgcaccaggattcttattcacaccaatggacagatctgttgaccatgaatcacttcaaccaaagctaatctttgacatcaaacagagaaataagctacacaagtggaaccgaccgacaagcgtcaagacctacttgtcatggaaacaaagcgttggattaaccgagaacgaccacatatcgtttcacaatctatacgacgagatcttcatttacaaccgaccactcatccaccaaatcaaggaaggagaaggacgattctggaaggacggaaaacccgttccttactattggaacactcttcacgtacgttcacacgtcgtcgctcaagacgagcccgacaaactacgaggagtctttggagctacaaagctcgttctacagacagaacaacccttcatttggcccttacaagccagctaccttaacacagacgcaggacgcctgttatggggaagagaaatgagcaaaggaggatggcgaacgctattttcagaaatctacgaacacggaccaccacagacggtctgcggactagattggagccagtttgacaaacgtctactgcaccaattaatccgaatagttcacggaatctggagacaatacttcgacttcacccgctacgaaccaaccaaagactatccaaacgcaaacccgagagaccctcgacgcgttgaacgcttatggaaatggatgtgcaacgcaatcaccgacacacctattcttctgcctaacggcgagctatggaaatggaattggaatggattcggctcaggataccaacagacccaactgatggacactttcgccaatgcgatcatgatatacacatgtctactcgtactcggcatcgacgtccgatcaaaacagttctgggcacgctttcagggggatgattctatcaccactttcttcgagcaaatgtttcgtatctatggtaacgactttctaatcatgttctcagctgtagctttgaaatacttcaacgcgaaactgaacgtgaagaagtctttcatccttggccatgtacaccaggccacggtactaagctatccgaattggcacggcacaccataccgtaccgaagaggacctactcagacatctaatgtttccagagcgcccacaagacctcgggagactagcagcatcagcaattggcctcgcacaagccgcactcggctcgagcgaacgattccacaacctctgtgagcacatattcaacaagctcgtaaaacagaaagggatcaaagtcaaatggactgcactcaaatggatggtaagagcaggatattacggtacaattgaccaactcaaacgaactgagttcccgaagatcgaggaacttctttcgcttggcattgaccgatccagcagatcagagaatgatcgccaacgcatctggcccaccagcccgaacgctaaaggcggctttttcttcttgaacactatttaa

SEQ ID NO: 1519 - DNA, 1714 bp, Helianthus annuus leaf-associated partitivirus 1
  source 1..1714: mol_type = other DNA
atgtcaaaccttgagtaccttggaacggaccaccactggccccaaatccctagatttgcaaagcaaccaaatgattggtactttgattgccagaacgtcgttagaaaagctgtttgcctctactcgtgtgtcttaggacctgattctactaacaatgttgttaatggattttacagatcccatgccgacgaagcatctgctgagaaattctttctcaaatatgatgtcgaaccattcgacatcgtcaaagacgatatctattatagggcgcttcaaaccaccactgattggtttaagcctactcaccctatccaccccgtacacttctgcgatctgctgaagtatccatggaaactatctactagtgctgaacgaccattcacgcacaataatgaactcaagttgctgatacaacaattgaagcaagaaggtatactcgacaatgctcgaatgtcctttcataattgctactttaaggtattttctgaatgccgcactcacatacataatgtgaaagatggccttaacgtacccctgtatcacattgacttacatgtgaaacctgccttagttcgtgtaaacgaaccaccaaaagttagaacagtttttggcgttcccaaatcactaatattctcagaagcaatgttcttctggcctttatttagtaattactttacgaatgctcaaaccccgttactatggaactacgaaacccttagcggtggatggtatagactcaattatgagtactgcaccagatggcgatcttataacactatattcaaccttgattggagtgaattcgatatgcgagtttactttgatatgtgggatgactgtagagctgctgtcaaatcttacttttgcttttgtggccaatactgcccaaccagagaacacccccacgcctcaactcaaccttttagacttgagaatttgtggaactggactggcatggcatacaagcaaaccccctgtacaaccactactgggaatgtctaccgaagacgattcgctggaattccatctggaatattctgcactcaattttggggatcattctacaatacagtgatggttatatctgtcctcgattccttaggaatccgcattaccaaagattctttctttaaagtattaggtgatgacgtactatttggaatactcaaattactacccatttcgcaatgggccgacttcctgcaagccttctctgatgaagcaaagcgtcgattcaatgcgaatttgaaccctagtaaatgtggagtatctataggtattcacggtgcccaagtacttagctacagcaattggaacggcttcccaaaacgagacgctgaacagttgctcgcgcaattacttcacccgaagtcactccgtgacacttacccaagactcatggctcgcgccattggtatctactacgctagttgtggagaccctaaagtgcgctgtgtctgtgaacatatatactcggagctcaaatacgctggttttgaacccagtgcatcaggcctctccggcctgttcgatcccaatgctggtatcggaaaaatcgaccttagtcacttcccttcgaagaccgaagttgtcgccagactgctgaaagtatccaggagaaaccctgatctgcaagctgtttactgggactcggaacacttcttagaagaagctggaagaagcacgacctgctctgtccttccaacctgggtcg

SEQ ID NO: 1520 - DNA, 1434 bp, Helianthus annuus leaf-associated partitivirus 2
  source 1..1434: mol_type = other DNA
atgaatctgaacgcattacgtaactatgagtacgtggacttctggacggatctagaagagttaccaggaactcatgtttacagcatcaggcgggagcctgagcaaacatattacgatgagtatgcaaaacataaactcatcaattatcaccaggagctgtataatcagtacatcgaaggttggtctcggagttattactcccatgcaagacacttggaagcactgttaaattatgcaactgctgacataccagttactaaattagactgcataagatacggagcatgtatcaacgcagttagaactgggttaagtagccttccacgtgtgagggcattcgatgtactaactgagctagacgaggttagtttcaaatcgtccacagcggcgggctacgactacggaggtaccaaaggtccaattcgtggcgaaaaccacaaacgggcgatgagcagagcgagagcaattgttcatgacgttcatgaaaagggtgtagaagcactcaagaatgttatagagacaatggttccagatgtcgggtacactcgaacacaattaaccgatctaagtgagaagacgaaagtcaggaatgtatggggacgggcgttccattacatactaattgaaggcttgatagcgaatccgctaatcagagctttccaaagcgtcgaaaccttttaccatattgggaaggatccactagatagcgtacctaaagcattatcacaagccgcgcgagcaggaagatggttatatgcaattgactggaaacagtttgacgcgacagtaagccgcttcgaaattgaagcagcatttatgttagtcgaagagaaagtagactttccaaacgaccagacagctgtagcattttatattgctaaacaactatttatccataagaagatagccggcccagacggtaagttttactgggtacacaaaggtataccatccggtagttactttacatccattattggttctatagtcaatcgacttagaattgaatatttatggaggacaatcataggtcgaggaccgaaatgttgttttactcaaggagatgactctctatcgagtgacgacgaattcatcccaccagaaagatttgccgaagtagctaacagtattggttgggttttcaacccagacaagactgagtattcaacgataccaggagaagtcactttcctaggaagaacagtccagggaggtatgaatcgaagacagcttaagcgctgtatcagactccttatcctaccagagtatcctgttgaatcagggagaatatcagcttacagagcgagatcaattgcggaagacgcaggaggattgagcgctatacttaaccgtatagctgaagagctggaagccgaatacggggtagcatcaaaagatgaagtaccactttattttaaacgttatattatgtaa

SEQ ID NO: 1521 - DNA, 1605 bp, Helianthus annuus leaf-associated partitivirus 3
  source 1..1605: mol_type = other DNA
atggaagatcacactcaagaaccaacattccacatcctttctgaggggtctcattcagttgacgcactccaccttcgagctggaaactcaaggtcaaccaccagcgaggatgttcttccgaaaaactattcgtctgaaacgcttcgggagatagcaaagtatggcggatattccacttatagctctaactctaatactgacccttacgttagagagagcctaaaattattctcccgtgaaaagtatgaagacatccgaggcttcacacgtaaacccgaaggtactcaaggtatgtacaaggcccttagtagattcggtggtgaaaagaacacttggtcacagctttcgcgcgttcaacaacgtgcgatgaagaaagcgattggtaatgccgagaaggcattcaagctcccttacaaaagggagccccttgattggcatgacgtaggccagtatctgagacgtgacacgtctgctggtgcaacattcatggggcacaagaagggtgatgtgcttgaagagatttaccatgaagctagatggcttggacacagaatgaagcaggatggtaagggtacttttgatccttcaaagatgaggttccccccttgtcttgccggccaacgcggcggcatgtctgagattgatgatccgaagacacgcttgatatggatttaccccagcgagatgttagtggtcgagggacagtacgctcctcgaatgtaccatgatttcatggcggacccaaacacaccgatgctcaatgggaagagttcacaacgcttgtataccgagtggacttgtggattgagagagggcgaaagactatacggcatagatttttcagcgtttgactccagtgtgccagcttggctaatccgtgttgcgttccgcattctgaagaagaatgtagagtgggaaacgtggaacggaaaacccgtgtctaaacgggataggcaaaagtggagaaacgtctgggatgccatggtctggtatttcatcaacacggcgatattgatgccggatggacgtatgttcagaaaattcaaaggagtgccctccggatcgtggtggacgcagatggtagatagtgtggttaaccacattgttgttgattatcttgcgatatgccaggacgtaccgattcgaggcctccgtgtactcggggacgacagtgcctttcgatctgcacctcgcttcagcctcgaggtggcgagctcggacactaagccgttaggtatgactatgaaacctgagaagtgtgaggagaccgacgacccagcggacttcaaactcttaggcacaaagtatcgaaacggtgtacccttccgtgaaacggaagagtggttcaagctttctctgtatcccgaatcgtctgtgtggacagtcgaaatgtctctttcgagattggttggtctctggttaggcggcgcaatgtgggataaatcattctgcgcttttattgactacttccaaagctgttacccttgtcctgaagaggggtggttctctaaggatcagcggcggtggttggaaatcgtctattcagggaaggtaccaagaggatggactacgaagaagagtctgttctggcgtgcttgtatgtag

SEQ ID NO: 1522 - DNA, 2241 bp, Helianthus cryptic virus 1
  source 1..2241: mol_type = other DNA
atgcctttcactagcgtacgtgactatcgtgctgaacgcctagcccgaattaagaaggaaatgcaacttttccagactgtcggccacgatcctaacgctatgcttgagtctgtccaagaccaagactatcgtcgctactgcgataacgttcgttataatcctgataacgaaactaaatttcgcatacttaatcaagagtattctactcttgttcaagcgtttcgtgatgacaacgaatgtaagcaccaaccttacgaactccatcaacgtgttccaattgacgccgcacctatgcctcaatctcgactacccgctgctggaataaaagctgtcccacttatgtaccattatggccatgttatacgtgaccctactgataccgttctcactgatgcgtccgatgacctatctgaatcgtcaagtgattgtaatgacaaatcgacctattttggttaccctgttgatgaacgaatctatcgactcatcgtcgctcggtatcctgaataccttggagtaatctcgacttattgtcgaccccttggcacagttgaagccacttttgctgactttaataaggaacaaattccttctgaccctattgaccctgcaaggaaagaacacatcttacgacatgttcacagattcctcgatactgaaccatatctccccctccattttgtcgatacccaatactgcaagacaccccttgtcactggtactggctaccataaccggtattcttacaagcaaagggcccatgcgaagtattctcatcctgaacagtacagggatctaccttcatcgaaaggttatttccacaactcaacatatgagaacgcccgaacaattgttcatatgatcaagaaattcggatccccttcgcccatcccttatgatccgttagatgaagatctttctgatgagaacaaacaacactatgttgaccttctcaacaaattcttcaatgactatcctacgttattgttcacccgcaaccacatttctagacgtgatggcgtcttaaaagtccgtcccgtttatgctgttgatgatttgtttatcattattgagttaatgctaactttcccactaacagtccaagctcgtaaacagagctgttgcattatgtatggccttgaaaccattcgaggttccaaccattacattgaacgattagctcgttcgtattctacattcttttctttagattggtcaagttatgatcagcgattacctcgcgtcattactgacatttattacaccgacttccttcgaagtttgattgtgataaaccaaggataccaaccgacctatgaataccctgtatacccagatcttgatgaacacagcctctacacaagaatggataatcttcttagattcctccatctttggtacaacaacatgaccttcgtcttacccgatggttttgcttaccgacgcacttgttgcggtgtaccctccggcttgtacaacacccagtatctcgattcttttggtaatctatttttaataattgattccatgattgagttcggttttgacgatgtccaaatcgatgaatttgttctctttattttaggagacgataacactggtatgactactatccccattggagtcattcataagttcatcctgtttcttgagtcttatgcgttaattagatataacatggtactttcatcaactaagtccgtgttaactactttacgctcaaagatccaaacccttggttacgaatgtaactatggatcaccagttcgtgatatatccaagcttgtagcccaactctgttaccctgagaatggtctaaagccgcacacgacttccgcccgtgcaattggaatcgcttatgctgccgctgctcaagatcacaagtttcactcgttttgccacgatatttataacttgttcctgccgtattacaaacctgatgatcgcactagtctgtattttcaacgccaaattcttcataaccttgaagatggcttgcctgaccttgcgacaccaaccgtgcccttatttccgtctttctaccaagtgctccaaacgtactcatcgtacaaaggaccactgtcctatgagccgaaatggaactatacccattttatgaacgaccctgataagacacaacctccagtcaaaactatgcgcatgtatgaagaagaacatggattcgtcattcataatgctcctacttttgaaacggtcgtgcctagcacagaaaattttccgtga

SEQ ID NO: 1523 - DNA, 1752 bp, Heterobasidion partitivirus 14
  source 1..1752: mol_type = other DNA
atgttttccttcgtccctaagttcgtcaaccatatctctgactggttcttcggccctcagcctgatcctcatggattcgttcacaactacaagttccttggctacgccaagcccaacccatttcaacgacgaaacgaaactttatattcgaactaccaaactgtagtttacaaagctctacgcgagaatcttctcgggtatgactgtgaatatataatcaacggtttccatcatcctgctgcaacaatggactcagtccttgactctatgcgcaaaggtgatatcccagatcatcctattcctatggatgaccactttgaccgtgctcgtcttgaaacgttcaatcgcttcaaacctcctcaactcatccgacctgtacacttcgctgacttgcgaaagtacaactggaactggcaccctaatgttgaagagccgttctactctgatcaagagctaagaacagctgtacaacaagctcacgctgctggtatccttcctgatgctagaatgtcttttggcaatctcaagaacgtcgtcttcatacgtgttcgtgaattacttcactacattaagcggaatcaactgactaatcatcgtcttttgtatccgataatgaacctacacgtcaagcctgcacttactagtgtagacgacttcaaagtacgaaacatctatggcgtcactaaaattcatgtgctcccttctgctatgtttttctggcctctattccgttactatctcgataatcgtgacgactctccattactatggggattcgaaacaattcttggtggcatgcaaatgctcaactccatgtacctcctttctcgtctgtactattctacctatgttactgtcgactggtctggctttgactatcgtgcctacttttctattatcaacaatgttatccaacatgactgccgaaaattcttcgactttcataacggctacattcctaccaaattctatcattcatctgaagctgatccagaacacctggaaaacctttggaactggatttggactgcaatcaacaagatgcctgttcgtttacctgatggaactctgtatcaacgcattcacgctggaatcgcttctggcctgtttacgactcagttcctcgactcatggtacaacgccctcatgatcctgaccgtcttagacgcgatgggttttgacatctcaactgtttcacttcgtgttcaaggtgacgattccatcatcgctctcatctttcacataccctcaagtgaacacattgcattcaaggagaaattcgctgctcttgctttatactatttcaaccatattgctagatccgaaaagaacaaggtgactaatgacactcaaggtgtcgaagttcttggttacaccaatgacaacggctaccctcgtcgtgactggcgcaaattacttgctcagttgtatcaccctagagacaacaatcctacctttcaacgtttgaaggctaaggtttgtggtttcgcttacgcttctatgtacgcggaccgcgaagttatcaacgtcttgaagtccatctgggactatctagactctattggaatcaaagctgatctattaccattacaacgtgatatcatcttacattccgaagaaaacttcgaagtacctactgaccacttcccgaccatggaagaggttacccagtacttacgtgttcctaagcgcagaactgctgctgattctgaagcatactttcctatgtctcacttcatgtcgcacttttga

SEQ ID NO: 1524 - DNA, 764 bp, Heterobasidion partitivirus 16
  source 1..764: mol_type = other DNA
atgaacattgttgatctagagcccgacttcaagaacgcagttcctatccatggacgcgatccaactgaacgcaatccagtcactgaagccagcaatcgaactatcgatttcgcactacgcaaatttctctcccaagaggaagctgacacagtcatcaacggataccgacgctcaccctggaatgaagacgcactcaaccacgacattgagaaactcaactctcaatcccacaaagtcgtaaaagacgagcactacaaaaacgcaatcaaacacgtttacaagctcatcaaaccagaccaactcctacaacctgttcacttcgctgaccttcgtcactacaaatggcgattatctaccaactgcggcgctccttttaatagctccaagaattggcaagactacgtcaccgcaaaatacgaatacttccaaaaaggtattcccttcaacaacatcgctcatcgcgacctattcgttgaagcgcacaagaacgttcaaccccttgagatcactgacactcgcatgtcaaaacacaatctctacactgaactattctatatcgcaagagaacacatccacagaatcaaagatggtaagactaccacacgcacgacgggccaagacctccggttttggaataccgctttcgcgagacaacaccttgtcaaagtccatgacgacgacaaagtacgactcgtattcggcgcacccttcacgctactgaccgctgaacttatgttcatctgggccactccaagtccaccttc

SEQ ID NO: 1525 - DNA, 1863 bp, Heterobasidion partitivirus 4
  source 1..1863: mol_type = other DNA
atggagtacctcaccacccagttcaatcgtatcacgaatcactttcgtgccaacacgaacctagaactcatcgggcactaccactacgaaccgaaaccacctcgtgtaaacgaagttgccatttccaatcacaaacgcactcttagcgttagcttcaaacaatttctcacctcaactgagatcaagctaatcactcaagattatcgccgttcagaaatgaccgaagacgctattttagctgatttcttcgccaacgacgttgaaaaacacgacattccgttcgattatcacgttgaacgtggccttcaagccatggccgacgcattccgccctcctcagttatgtatgcctgctcatattaacgacgttgaacaccactacccttacaaatggcaagtaaactcagaagcaccattctcaactgacaagtactttctcgacaaccgtaaaccatacggagactttttcgacaaagagtccctctcatggaagaattacgtcaaccccgaagacatgcaacgacgcatccctgttccctccgaacaaacgctcgctcaagtcacacctcctaaattcggctttcaaaaaggccaagttttctcgtgggtccgcagatggcatcatatagtcaagtcaaatttcacagatctgaccgacttagcctcttcttcatacatcaaggatagattcgtcttccctatgcttttacacacaaaaaccgctatcgtcaagcaaaacgaccctaacaagatgcgcaccatctggggctgttcaaaagcttggatcatcgcagacacgatgctttactgggaattactcgcttactacaagcttaatcccggcaaatcacctatgctgtggggctacgaaaccttcactggtggctggctccgcttaaacgcagaactgcacaatggtcttattcgaagttcctttcttacaacagattggagtcgcttcgacaagcgcgcctattttagtctgattcacagaattatggctatcattcgcacctaccttgacttcaacaatggttatttaccaaacgagctctaccctgacactcgctccgaatggagcagtgacaaagctcaacgtttggagttcctattcctatggacactcgaaaatctctttcaagcgccaatcgtcttaccagacggacgcatgtatagacgacgtttcgccggaatcccttctggcctgttcattacgcaactcctcgactcctggtacaactacaccatgttagcgaccatcctctccgctctcggcttcgaccccaagagctgcatcatcaaagtccaaggcgatgactcaatcatccgtctttatgttttgatacctcctcattctcacgaagaatttttgcttaaaatgcaagaaatcgctgattattacttcaaatccgtgatctcgacccaaaagtccgagatcgggaaccgccttaacgggcgtgaagtcctgagttatcggaataacaacggccaaccataccgtgacgaaatcctgatgcttgcccagttttaccacaccaaggcaaaggatcctagcccagaaatcacaatggcccaagccattggattcgcttacgcagcatgcggcaacaaccgccgtgttcacgactgcttagaagatatttatctttactataagcgaaaaggctacacccccagtcctgctggtctcactgtcacatttggtgactcacctgatctgccgaaccttccgttcaatctcgactccttccctaaaattgaagatgtccgagcgtatttcttacatacgtcatatcgcaatgaagagcaacagcgccgtacctggcctgcttacttttctcatcctccttgcgaacgaccttaa

SEQ ID NO: 1526 - DNA, 1875 bp, Heterobasidion partitivirus 5
  source 1..1875: mol_type = other DNA
atgaatacactcatcacccagttcaatcgtatcacgaacttctttttccaaacatcaaatttggaacttgtaggttcttaccatcaccacccgcatacgaatgtcccactcgaatcgcaccatatcgcacatcgcgaaacattggaccatgcttttcgaaagtatctctacccacatgagatcaaccatatcacacaagaacttcgacgttctgaaatgacgcaagacgccattctcgacgatttttttgctaatgatgttgaacctcacgagataccttttgacactcacgtgcttaaaggactcgactcaatggaacgcgctttcgcgccacccgttaaatgtcaaccgtgccacatcaatgatgttgagcaccactatccttacaaatggcaggtcaacgcagaaccacccttctcaactgaccaatactttttgaacaatcggaaaaccttcggtgaatactacgacgaagactctggcacattcacaaaatatgttgatcctaacgacgcacaacgacgctacggtacacgtatctctgccaattttttgtctgccctcacccccgccaaatttggtttcatgaaaggatctatcttttcttggacccgccgctggcaccacattatcaaaagtggtttcacggatctcactggcctcgaatctacttcctatctcaaggatagatttatatttccgatgctcctccacaccaagactgcgatcgtcaaacgcgacgaccccaacaagatgcgaaccatctggggctgttctaaaccatggatcattgctgacacaatgttttattgggaatacatcgcataccttaaactgaatcccggctgcacacccatgctctggggctacgaaaccttcacaggtggctggctccgactaaacgccgcactcttcagttcatacctacaacactctttcttgacgttagattggaaacgcttcgacaaacgcgcatacttcaaacttatacatgctataatgttacgagttcgcaacttcttagacttcgacaacggctacgtccctaatactagttatccctccactagttccgactggtctcaatccaaagcccaaaagcttcaaaacctttggctatggaccttagaatgtctctacttctccgccatcgtcctccccgacggccgaatgtacaaacgacgcttcgctggaataccctccggccttttcataactcaacttcttgattcttggtacaactacaccatgcttgccacactactctcagcgctaggactagatcctgacgcctgtataatcaaagtgcaaggcgacgactcgatcgtccgcctaggcatctttctccctcctgatgctcacgacgcatttttacataagatgcaaacactagcagacttttacttcaaagctgttatttcacttgagaaatccgaactccgcaatgagttaaaccactgcgaagttttatcctatagacatgtacacggcctaccttacagagacgaaattgccatgctcgcgcaattctaccactctaaagccaaagtacccacaccgtctatcacaatggcacaagcaattggattcgcctacgcctcctgcggtaataacatacgagttcttcttgttctagaagacgtatacaattactacaaatcacaaggctacgaacccaaccgcgctggactaacgatcacattcggcgattcgcccgatgccgtcattccacactacgatttgagccacttcccctctcaattcgaaattaaacagttcctgctaagttacaactatcacaacaaggaagctgccgccagaacctggccgcaaacttacttcctcaaccctccctgtgttagaacttatgtttga

SEQ ID NO: 1527 - DNA, 1863 bp, Heterobasidion partitivirus 9
  source 1..1863: mol_type = other DNA
atggaatacctctcgaacctcttttctcgtgtcctcaaaatcacgaagacaaccaacttcgaattcgttggcacctaccacaaccagccatcgataccacaggtcaatcaaattgcaatcgacaaccatcagcgcacaatccgtgtcgcaatggaacgttaccttacgtctgacgagttcagtctcatcaccacaggatacaaacgcacatctctcgatccagctactatcacagacgacttcttctctggcgacatcgaaccacacgatgaaccacaagatctcgcttcacaactggcaatcgaagcaggcctcaacgccatgcaacgtgctttctgcccacccaacccggctcgccccgtccatctctacgatgtagaatggcactacccttacaaatggcaagtcaacgcagaagttcctttctctactgaaacgtactttcttaagttacgaaagaagttttccgacttctacgacgctgcctccaaaacttggacgcactatgtcaaccctctcgatgcattacgacgttacggacccgaacccccattcgacactctgaaccaagtcactcctccaaagtttggcttcatgaaagaactcatcttctcattcgttcactcttggctacatgtcatcaagtctcgcttccacagcaacgctggttacactcattccaactttctccgtcaacgttttctctttcctatgcaactgcatatcaaaacagctcttgtcaaagctgatcaacctaacaaactcagatctatctggggcgtatccaaactctggatcatcgccgaaaccatgatttactgggaattgatcgcttacatgaagttaaatcgcggctcaactccaatgctttggggttacgaaacattcacaggcggatggttccggctcaacgctgaactacaatcctcacacctgcgacaatcaatcatcactatcgattggtctcgtttcgacaaacgcgcatacttctggctcattcgcaagatcctgttccgaatccgacaacacctcgacttcaacaacggttacgttggcaccaaggactacccctcctcgcctaccgaccccgacaagctccaagccctttgggaatggacgctcgaagccctgttcgattcaccaatcatcctgcccgacggcaagatgtataaacgcagatttgctggaataccttcaggactgtacatcacacagcttctcgattcatggtacaactacaccatgctagccgccatcctcacctaccttggcctagaccccgaacgctgcatcatcaaagtacaaggcgacgattctatcatccgcctctacgtcctcatacctccttcagaacatgataattttttgcttaaaatgcaggaagttgccacgcatctgttcgcttctcgaatctcggaccaaaagtctgaagtcagagacgatctcaatggagccgaagttctcagctaccgaaacaatcgcggactcccgtaccgtgacgaaattcaaatggttgctcagttctatcacacgaaggcaaaagatccgacacccgaaataaccatggcccaagccatcggtttcgcttacgcagcttgcggcaacaactaccgtatccacagtttactggaagaagtttacaactactaccacgaacaaggattcacgcccaaccctgctggactatccatagtctttggcgactcacccgaccgtccggattaccccattgaacttgatcactttcctactcaacaggaaactcaacgcttcttactctccaccgactaccgaaatgccgaacaagacgcaagaacctggcctctcctccactttcttcacgctccttgctcccgctcttaa

SEQ ID NO: 1528 - DNA, 867 bp, Heterobasidion parviporum partitivirus Fr 110B
  source 1..867: mol_type = other DNA
atggccatcattcgcacctatcttgacttcaacaatggttatttaccaaacgagctctaccctgacactcgctccgaatggagcagtgacaaagctcaacgtttggagttcctattcctatggacactcgaaaacctctttcaagcgccaatcgtcttaccagacggacgcatgtatagacgacgtttcgccggaatcccttctggcctgttcatcacgcaactcctcgactcctggtataactacaccatgttagcgaccatcctctccgctctcggcttcaaccccaagagctgcatcatcaaagtccaaggcgatgactcaatcatccgtctttatgttttgatacctcctcattctcacgaagaatttttgcttaaaatgcaagaaatcgctgattattacttcaaatccgtgatctcgacccaaaagtccgagatcgggaaccgccttaacgggcgtgaagtcctgagttatcggaataacaacggccaaccataccgtgacgaaatcctgatgcttgcccagttttaccacaccaaggcaaaggatcctagcccagaaatcacaatggcccaagccattggattcgcttacgcagcatgcggcaacaaccgccgtgttcacgactgcttagaagatatttatctttactacaagcgaaaaggctacacccccagtcctgctggtctcactgtcacatttggtgactcacctgatctgccgaaccttccgttcaatctcgactccttccctaaaattgaagatgtccgagcgtatttcttacatacgtcatatcgcaatgaagagcaacagcgccgtacctggcctgcttacttttctcaccctccttgcgagcgaccttaa

SEQ ID NO: 1529 - DNA, 2271 bp, Hymenoscyphus fraxineus partitivirus 1
  source 1..2271: mol_type = other DNA
atgcccttctccatttacacgctcgccacgctattcattctaatacgatttcaacttcgtagaagaagaaagcagactacccccgagctcgagtatcaaattcgaaacgtcctatacgaatgggaactacgttccacattcccacgtgcaaacccccgcaccggaccgcttttcgattactcgaaatccctcctccactttatcgatcttgcaacatgcaagaagattaaagataacatcggacaatctatcgtagcaatacgccagagatataccaacagagatgaacccttcgcaatccgagaacccctcgacttcgaagcccttccctcaaacagaatcccagaaaatggaattcatttctcaggcttccgctatcacaaaattgcctccgctgacacgcctatcgatgaatcttctcatctaattgaagaagacaaactattcaccgaaaccacggacgaacgctcccgcataatttacgactcaaccgtcgacttatccggccaaccagcccaccccgaaattcaacagatcatccacgatcacttccctgaatttctcatctttctagatgaatactgtcggccccccagcttcggcccccaggcatttcgcgacttcaaccggcccaccgccgcgtttactcgcccgtcccccgaacgtcatgaagacataatggacattcttcgaaagaagtttaacattgtgccctaccgaccgcttcactttgttgacgccctcgcagctgacacccccctgtcaacctcgtcgtcatacttcacaaagcacgatccccgcgttcgcgtactcgcaaactactcaacccctgtacgttacaaggacaaacccacctcaaaaggatattcatttaacactgttatgaacaccttccgcacggaatttcatcacgttaaatacacacgataccctttcccgacttctcccacggaccctcaaaacgcagaaaagctacaacaatggtttctagaccatccctcccagctattcattcgcacccaaatctcaaaacgagatcctgacgctccaaagaaaattcgccccgtctactctgtagacgaacgcttcctccacgtagagaagacgctcatcacacccgcgctcgcacaaatgagaaaccctcaatgctgtgttgcccacggaatggaaactttcagaggcgcaatgtccctcctcgacaaaattgcacttcgctatgaatctttcatttcactcgattggtctcattatgatcaactcctcccctattatgtgattatagccttctacctggacttcctcccctccctcctgatcatatcgcacggctacatgccctcccgcggttatcacgacacgaaacaggaccccgcatcattcgcaacaaagattttcaatacattgattttccttgtctcatggtacctgtcaatgacttacctgtcatatgacggttttgcctatattcgcgacaatggtggtgtaccttccggactcttggctacccaactccttgactccttcggaaacatgtacatcatcttagactgtatgctggaattcggtttcaataaggcagaatgtctcgccatgctgttctatgtacttggtgatgataacctcatcttcactctaatgcatatcagacgcatcacagacttcatgcacttcatggaagaatacgctaacaaacgccatggaatggtcctctccgttctcaaaagcgtttacacccacttgcgcacgaaaatcactttcctaagttatgaaaataattatggcctaccttcccggcccatcggaaaactcgttgcccaactcgcgttcccagaacgtccacccaaacccggacacgactggatacacgccgcccgcgccctcggactcgcttacgctaattgtggtcaagaccaccgctttcacaacctctgtgaactcgtatacaataagttcaagccaacaacctccgtacccacgcatcacgttagtaaaattttcaagaaatggcaatatcaactgccaaaagaattcgaaatcaaaggacaagaatacactttcccagactttcctagtctacatgaaatccgcgacttagtcaaagattatcacggctcactccacgagcatgacaaatggaatttcgaactattcgactccaaacccagtgacacccccccagattacgtaactctgaaggatcatatcaaggatcaccgccctgaaatgtcctccatcattaacgaattttggcatggtaagagatccatttag

SEQ ID NO: 1530 - DNA, 1740 bp, Hypomyces chrysospermus partitivirus 1
  source 1..1740: mol_type = other DNA
atgtgtctacaacaacccactaacctactacacctaggccgctacccgatcaaccgaaagacaaaacgtctattagaccatcatcaacgagtttcacctcgtgaacagcaattcgtcgaaagactaacgaagaaagctatctacacgcactgctcccccgagctagcaaacgaagccatcaacggttaccgccgctcagcaacgaaccccgaagctggagaagaaggcttcttgaagacagaccttccttatcatgacgtacctagagactttcactacaagagagcactcaaagtagtcgaaaaaatgttccgcccaagcagaagattgaaacccatctcgtttcctgacctccgctattacccctggacattaccgaccgccgccgaagctcctttcaccgaaagtaagtactggcaagaaattgtaagacagaaagcccgcgaaggcgaaatcgacactgaccgaatgtcatttcataatttatataatgagatctttcacatcaaccgtcgcttagttcatgaaattaaatatggacgcaaacccttctggaccgacaacggagaacctctatcctacgagttcacctacttacactctcgctcacatatggttaaacaagacaagcccgataagattcgagccgtttttggagttcctaaactcttattaatggtcgaaaatatgttcatttggaatatccaacgtgaataccttaacgccccgcttggcaaatctcctctcctctggggatttgaaacaatacgtggtggatggatgaagcttatcgacaagctctcctccaaacatgtcacacacatcctttcagcagactggagtggctttgatcacaaagcacttcatgaagtgattgatgatgttcatgacatctggagaagctggttcgattttgaccaaggctacgagccgtcaaaaagcaacacccatgattattcagacactaaatctcgcgaagagcagattgaccgactatggacctggatgtgtaatgctatcaagcacacacctattaaagccgagtctggcaacatgtatcaatggcaatggaacggaatcgcttccggtttccaacagacccaactacttgattcatttgtcaatgcaatctaccttctaacatgcttatcagcctgtggaatcaacattgattcagagcactttcaagctctatttcaaggtgacgactcagtcacaactttcccagaaatgatatccaacccaaacgcatttacagagaaactaagtaatgaagcaaaacgacgattcaacgcagatctctcaatcgagaagactacgttcggaacaacgacagacgatgtcgacgttttatcatactcaaatagatccggtatcgcataccgatcttcagccgagctactcgctcacctcctctaccccgaaagaccacgcagacccgccgaatgtgctgccgcagccgcaggcatcgcacaagccgcaatgggatcctcccgtgaagtatataatacttgcaaagatgtataccactttttagtcgagacgctggaaattgaacccgaatggaaagcagttagccctaacaagccaacgccttactccatggatgttcaagaatttccttcctacctgacgacgttcttacaaaacttcgatcataggatgagaactgaccaagacaaacaacgtctttggcctaccattccaactggaaatggatttcacttcctcaactcttga

SEQ ID NO: 1531 - DNA, 1851 bp, Impatiens cryptic virus 1
  source 1..1851: mol_type = other DNA
atggactacctactgtccgcattcaatcgcattacctcatggtttatagcgcccactaactttgaatacgttgggaccttctccctccctccaggcctccttcgcactaatgatgtagctatcgctaatcacaaacgcacactggaacacgcttttcaaaagtatctttatgattatgaaatttccataatcaccaaagatttccgaagatccgagattaatctcgactcgatactaatcgacttcttctctggcgatgtaaaaccttttgaaatcccgttcgacgaacacgttgaacatggacttcaatgtatggctgacgcttttcgtccgccgagaccttgccgccctgctcacatcttagatgtgaaacatggttacccttacaaatggaacgtcaatgctgaacctcccttctccactgatgaatacttcctatctcaacgtaagacttttggcgagttcattcaaatgcacgaatacgaacacatcgataaagccgacttcttcagacgtcaccccaacatcgaatctcacgatctgatcaaaaccatcgttcccgccaaatttggatatctcaaatccacgatcttttcctggacacgaagatggcaccacataatcaaatcaggatttactgaatcaactgggctccaaacctctggatatttctacaatcggtttatctttcccatgctcctacacaccaaaactgctattgtcaagaaagatgaccctgacaagatgcgcaccatctggggcgcttccaaaccttggatcatcgctgacaccatgttttattgggaatacattgcttggatcaaactccatccaggcattacaccaatgctttggggatttgaaacctttacaggtggctggttccgacttaacaacttactgttctgcggattcatccaacgctcatttctcaccctagactggtctcgtttcgacaaacgagcttacttcccacttctccacagaatcatggacatcgctcgtacctttctcacttttgacgaaggttacgttccgacacatgcagccccgtaccatccccaatgggatcaaacaaaatctacacgtcttgaacgtctatggctttggactctcgaaaaccttttcgaagcgccgatcattttacctgacggccggatgtacaaacgtcacttcgccggaataccttctggcctgttcataactcaacttctagattcctggtacaactacactatgctcgctaccatactcagcgctcttggcttcaatccaaagtattgcatcatcaaagtacaaggcgatgattctatcatccgtctaaccaccctcataccacaagaagaacatgataacttcatgcacgaactggtagggctggctacccactacttcaatgctgttgttaatatcaagaagtccgaaatcgctaactcactcaatggtcgtgaagtattatcttaccgcaaccacaacggcttccctcgtcgtgacgaaatcgctatgctttcgcaattctaccacacaaaagcaagagatcccacgcccgagataaccatggcccaagcgataggcttcgcctacgctagctgtggcaaccaccgccgtgctctctgggtgttgaaagacatctatgagtactatcgcgatctaggtttcacgcctaaccgtgccggtcttacaatcaccttcggtgactcccctgacctcatgatgcctgagatccctcttgatcactttccaacaactctggaaatccgacgctacctcaccttgtcggattacaacaatgaagcgcagaacgctcgaacttggccacgtacactgtttatcagtggaccagccgagtaa

SEQ ID NO: 1532 - DNA, 1260 bp, Jalime partiti-like virus 1
  source 1..1260: mol_type = other DNA
atgaacgaaggagcagtacgtcctcgagatccctgcctcgatgaagcagtaagacgggcataccacgcttttaaactaccggaaagacagccgctactgcacctaaacgacgtgttccttcaagacttgccaatttggaattcatcaccaggtttgccatggacccagttagggtacaaaacgaaaggtgatatccgaaaagatcccgatgcgatcaagcgcgttcgttggttctggcaccgaatcaagtgtggccaaagattaggcctaccggactgctgcgcttatgttagatcgcacctctgtaaggttggtgaagcaaaggtccgtgctgtttggggttatccagcaacagttacctttggcgaagcagttttcgcactaccacttattagagcataccagcgccatagaaccccattagcgtacgggtatgaaacgggagccggtggcatgtggaaaatcttccatcagttcaaaggccggaactttcttggaattgatttttctaaattcgataaatccttaccatcctggctgatagaagtggccttcgatatacttgcgtgtaatctagactttactagatatcaagactatggagtcccactcagttctgcaatgttgaggatgtgggatgtgttaaaaacctattgcataaaaacaaagatacgcatgtgcaatggcgagcgttatctgaaaacatcgggtttagcaagtggcagctattttacccaacttatcggtagtatatgcaattacatcctgctctcatatgcggctctgaaattcgacgtcaaaatcgagagtatcctggtatttggagatgattcccttataggaacttttgattctctaactccagataacgttcaaacagttctagagccattaggtttaactgtgaacgtggagaaatcgggatattcacgaaacatctccaacctcacgttcctaggctatcgtattaatgcaggctacccggcaaaagaccgccgaaaagccatcgcaggacttgtatggccagaacggaatgatagatgttgggacgatgtcgcgtcgagagctcttggcattcttcacgcaaacttaggagttgatgatgtcattgacctctggtgccgaaaggtcgtaaagtttcgggagtttgagcttatcctatcacgggaccagcagcgatttctggacatgctaaagctcgatgtcagaaccccgaacttaccaaatgagttcgacttcttttatcgtcttcatcagtga

SEQ ID NO: 1533 - DNA, 1497 bp, Jilin partiti-like virus 1
  source 1..1497: mol_type = other DNA
atgaccaatatgccggtctataggcgtatggaacgtgaccgccccacaaagaacagcttggtgtacatcactaaagttgagggacacacgatccagaaggatccacaaattgtggacccattcgtcagacgcgctctcatcgctctgctggacaaagacccagtcgaggagttctccgaattcactcgctccttctatacggaggaaggtcactacttgaacctctggaagtacgatcgcaagatcactccaaggccaggcgatccagacatcgatctcgcgcttgaacttacgcgcaaggcattcgcacccactgaaccgatcctctccattggatgggactcgctcggtgaggttccctatattcctacctcttcagcggggtggaagtacaaggggccaaaaggtgctccaggaaatcacgagctcgcaatctcgcgcgccgtgggatcactctacgcatggcttgacagccagcgacccgaccgtgacaactaccccagatttcggtacacacccgatctggcgttcactcggacacagctcatgacaatggattcaccaaagatccgtcatgtatggggcaaggcgttccacaacatcatcctcgaaggaatgagcgcctctcctctgatccactactattcaagaatcggtcagccaatcgttgtaggagtccatctctacaagaagctaccttacctcatccgcacatgcctatgggacggcgaacaccgtcgcattggcgtaggtctcgacatgacaagctttgatacttgtccaatgccgtggctcatcaatgccatcttcgacatgatcgagtcttacttgaccttccctgacgagatgagccatcacgcgtttagatatacgcgtaaattcttcatcgacacaccagtcatcatgcctgacggcagaatgtggctgaagaagttgggagtgccatctggcagttactacacccagcttgttgactcgatgattaactacaccgtcatcatgtacctccaaactaaaatgtacaaccaacagtttaccacttgggtacttggagatgacagcctcttcggaatccctgatgaacttgggtttcctgacctggacgaggcagcacgaatcgtgaagcgaattggattcgaactatccacacgaaagtgcatcgttgcgacacatcctggatctcttgagttcctgggacacgtgagtcgcggcgcatccgtcgaccgagaatggtcgaagatgattttactggccctatttcccgaaagggaagtcactgatccgggccaatctctcgcaagggtattcggtttgctagttgattcggcactgaataacacaccactcatcacccttgcacatgcaatggaggctctctactcataccctgaaatgacctcacttgcacgagaagactcgaactggctacgagccgtagtcggagtcgagaagattcctccacacgttgacttggtgaaggtctggacgctcacttga

SEQ ID NO: 1534 - DNA, 1515 bp, Kacheliba Partiti-like virus
  source 1..1515: mol_type = other DNA
atgcctttaaatacaggaactggatattttaaccgccattcgtacaaaactcgtgctttagcaagattaactcgacctgaaccatatagagataaacctacatcaaaaggtttcttctataacgctacatacaagaaagagcgccatataatacacaatattaagcactcaaaatcaccaagaaatgagcgaaaagtcaaatcaggaatgatctcacgatctaaagtagttaaaacattctttgcaaaaagaacaacaatgttatacacacgaaaccacatatcgctaaaacccaaagagaaatgtcgcccagtctacaatgtagatccagttttcctaaaactagaagcgatgttaacattcccaggaatggtacagatgagaccaatgtcatcatgtgttctctatggatacgaaacaatccgaggaggatgccattacctagatcacatagcaaaaagctttaactcatatttcacaattgattggagttcatttgatcaaagagtcccacgaccaatcaccgacatatactacactgactttcttgaaagtttattagttatatcacatgattacagtcccacactcgatcaccatcccgaacaaccacagccaacagacgtatttttcaagaaaatgagcaatttattacattgcctacatgaatggtacaattcaatggtctatataacagccgatggatatgcataccagcgattattcgcaggagtaccctcaggtctactaaatacacagttactcgattcattcgttaacttatatttaataatagacggactattagaatatggattttcaccagatgaaatccgaacattcaaatttttcattatgggtgacgacaactcaggaatgacaaatttaccattacaagaacttgaaaaattcattgcattttttgaaacatatgcacaagagcgatggaacatgacactttcacaagtaaaatcaatcattacatcattacgaaacaaaattgaagtacttggatatcaagtcaactttggtacaccataccgattaattgacaaattagttgcacaactatcatatccagaacatggtttaaaaccaaaatacatgtcctaccgagcattaggtattgcatacgcagccgccggacaagactatgaatttcatcaattttgccgagacgtatacatggcattcatcgaagataaagccgatttaacatccgagcttaaagataaacttcgaaaacacctatcaggtgccatgcgatccgacgatgacatatttacagatataaactttggtaaatttccaagcatcgaagaagttcgatccgtataccgagaatggaaaggatcattgcagtattctccaaaatgggattactcatatttcttaacaaaaccattcgtagaagaagaaaattacattaccatggaacaatatcgtaaaattcacaacatatcacgattacctgtaagacaatacagaatagacgataaaattataagacagtag

SEQ ID NO: 1535 - DNA, 1710 bp, Kagbo partiti-like virus
  source 1..1710: mol_type = other DNA
cccgcgaaatcgcacactatgaggaatgattacgagttggatagtaatcccggatcgtgcgacgcgccgatcccgatcattcggaagtacgatgagaaccatccgtacgagttcgaatggcgagcccctccccaggtcgaaggcttgacgctgggaccagcgatgagacagctggagaaaagagcccctttccccgcttcttatttcccaccacatatcagcgtaaatgcatgctacgtatttgaccaatgtggtatgaaggcggaaagagtagagttactctcaaagtatcaacgaagctgggtcacccaagactcactaaggaaatcaacgcttggatacagccacgttaagtacgcacccgcgtttaacgattcccgtttggatgaagcgatcgagttcgttcgagatgagttcgttcacgcattgaaggaacccttgaagtcatggaccatcgagaaggtaatgaaggaaggtgacatgccgaaaaacacctctccaggactaccatacattcaacaaggctacaggtcaaaagccgacgtctggaaggatcatcaccaggacatcgaagaggagcacatccgtattcgcgaaggataccgcccacggacaccagattgtgccgcattcgcaagaagcatcgtctgcgaaaagccgaagaacaaagtccgtctagtgtgggcctacccactagaacaggttctactggaagcgaagtacgtgcaaccactcctacaagcaatgacatcccagaagattggacaaacagtcgcatatggcgcagagactatgcgcggaggcatggaatggctcaacactgagctacattcactcccaaggcagaactacatatgtatcgacttcagcagcttcgatcaaaccgttcctgcatggctcatcaggatcgcatttgatattttggaagagtgttttacaaccacggaagtagaggacgttaacggtcgaattgtcaagacaaacgatcgtgtagtcgcccgtgagtggaggcagattaagcactacttcatcaacacaccgttaagaatggaagatggcactaggtacgagaagacaggaggagtaccatcaggatcttgtttcactaatatcgtagatagtatcgtcaacatgattgtaatgcgctatgttctaatgtcaacagcaggtgaatggccaaattttctcaccgtacttggagacgacagcgtaacagccacgacaggactagttaatctcaacgacatggcacaagttgcaaaggataaattcggcatgattatcaacgttgagaagagctattggacgcagtatattggtaatgtccaattccttggttactacaatcaccacggctacccagcccgagacgaagacacgttgctcgcaggtctactactacccgattcaagtgtggacgaatcgttagcactcaccgcagcaagattcctcggtatatctcaagcatcatgtggagcaagcagagcttgtataaagctgacgaagtacctgtttcgagaactcgaaagaagagggaagaattttgtcgtcgatgcacagaagctttaccacattcagaaagcaggaggatggcttcccgccgcaggagagaaaccggaaccactacccgcagtaccgttcctagaatatgctgttttaccgaaacattcgtgtgaaaagctaaagcagggcataaggctagctagatga

SEQ ID NO: 1536 - DNA, 1869 bp, Kummerowia striata partitivirus
  source 1..1869: mol_type = other DNA
atgccagtcggcgcagcaagagccgattccacgcgaagcaaacctgtctgcacgcttaaggaaagtgaggcggtcatgcttccagtgcatgagcgagcgggtatcgagattctcggtccgtatcgcagcaaaggtaagtctcgtaaacttgccgatgctttgcacgcgttgtcccgagtcgtggaagtcccagcgatcgacgttcacctgtttcaggcgatccgggatagattcgggatccgtctcaacgtggatgaggagaacagaagtgtcacctcagaccaatgggtggaacgggcactcttggcatacggatgcccaatccatcgattctacggagacggtcctaacgccagccggaaacgtcccccagcttgcacctgtattcagcgagggcaacgagggctggaagtccgcaacagtggaaatggagccactggaccaacaagaggaggaacaggagagagagcagagagctccgcggaaacgcagggtgaaagttacatcgcgccaaccgatagaggacagcgcggacctgctgtacgtagccttcgcgaagactttcggggagataccctacccggcctatcagctggagtggcggttggctctgctcgaggaccccagcaagcagaagcacaccgagctgcaatacgttcggtctatagtgcagcgtcctctgttgagggaaggcgaaagcctatcgcacgcactgaagtggtggcgcatcacatccatgctagctcttacgctggcttgcctcacctctgtgctaatgagttggctctggaaaccgggctacgccttgctggacagattgctgacaacaaacgcgggtttgacccttatctttttggtcgccgtgtgcagcctggtctgtttggtccaaagactcgcctggtatggatggcgccgcttgcgtcgacaattatcggtcttgcattcgccagaccggttcaagaagcgctggcgcgaaaccgtccgtacatctggggacttagacaccacgaagagggagcgatcctagctgaatttagcgggcgctaccgttacgcgtattgtctggactggtcgcagtttgactcgtccgtccctgctagcctgatcaacgacatgttccgtgtggtgcggagtatgcttgatctcactgtcgaggaagacgggttattccaccgttacgtgaatgattttattcacactcgaattgtgctgcctgatgggaacgtctatcaggtacatcgcggcgtgccgagcgggtcggcgtttacgtcgttgatcgacagcatggtaaacgtttaccttgttaactatgtgtggtaccgtcttacgggccacgttctgtcgcacaaacagatccttgtgatgggagatgacgttgtagttggcactagcgagcgtctcgaactggcagagattgcgcgtgtagccgacgaactcggattcaaactgaacacggtgaagtcagtgatcgtgaacacccatgaagagggtcatggtatccacttcattggacactcgtggtcgcgtggtcgtgctagaagaccacagcgtgagctgttgcagcgagcgtctcttccagagagacacgctgagcaaagcaagtcccggtcgcttacgcggctcggtggctatgctctcagttcggtagatggactgatcatcctaatcgaactgtaccccgaggaaagcataactgggtcggtcatcagattccttgatgatctacgtggtcacggaggcggatcaaggttgcgggcgcatgatctcccaggagatttaaggagacgtgtgatgatcgaaggagctgagactcccgatgtgggcgtgggttctggaccccacggtttactattcggatctctgttctaa

SEQ ID NO: 1537 - DNA, 1134 bp, Lampyris noctiluca partitivirus-like virus 1
  source 1..1134: mol_type = other DNA
atggataactggggatcatcccctggtctcccttggcgacagcttggttttaaaacaaaacggcaagtcgcagacgacccgtatgcattccagagtataagacgtttttggcacttagttaaagaagggaataaagtcagtctaccagactgcgctgctttcgttcgaccacatcttgtcgaacggggtgaaaagaaagttcgtgccgtatggggttacccatgcacagtttcttttcaagaggcttgtttcgcactaccattaatcgaggcttataagaaagttaatacaccatttgcctacggttacgaaacagctcgaggcggatgcagacgaatattcctgcgttttgttaaacataagcactttcttagtaatgattataagagttttgacaaaaccatacccccttggttaaccaggatagcatttgatatcttgcttagtaacttagacctaactgagtaccaagaccgggggattcctgattccgagaaattgtatcgagcctggaagaaattagttaaatattttattgaaacaccaatccggctctgcaacggagaaagatacaggaaaaagaaaggtatagcaagtggcagttattttactcaacttattggaagtattgctaactacattgccacaaaatattgcatcctttctcaaaatattcaagttaaagacatgttggtacttggcgatgattcactcgttgccactgatcgtgcagtctcacttgatcagttagttagtgatgctaagaggtttggtttaattattaatgatagcaaaactcagcgggttaataatgttcgagatgttaaattccttggatatactataaatgacggaggtccatcccgtccccgcaaagaattgtgcgccgccctcgcccaccccgaacgtccggatcaagattttaatgaattcgcaacccgtactttgggattgatgattgcaaactttggacatgacgttgacttccattgcctttgtttccaaatactgcaatctccttttaaattgtcctacaatccatcatttgtacggtacttaagagtccttggaattgaagaacttcccaaggctccacctgatttgtttaaacttcaactaatgcgatatagatag

SEQ ID NO: 1538 - DNA, 1311 bp, Lampyris noctiluca partitivirus-like virus 2
  source 1..1311: mol_type = other DNA
atgctctctacattcctttttcctgagttaagcgtgcacagtgctaggcccactaagacctatgcccaaagtcgggatcctgcttccgtgatccggcagtttaggaaacgtcacctcctaaccccgccacccgattttgagatgcccaagcacttttcattccttgaagagtcgtataaacctcttcatttcaacgatagtttagccttgttcacccccagttcgctggcctcgtcgccaggattcttctatcagaacttaggctataaaacgaagggagatgtgctgagaagtcgaaaagctgtcaatcaccttagacggcgtgttcacttcattaaacagggacaatacaaacctgctgccccagctggcgtatttgtagctcgttcaatatatgatctacaaaaacagaaaatcaaacgccgtgtagcatgggctttccctattgaagtaactgtgatggaggctatgtttgcccgtcctgttatcgactctcttccatgcgactatattccaaagccgcagacacatcaccaccgttactgccaaactggcgtccaactagatttcaacagttttgacgcttcagttccacactggctagttgatatggctttatgtgacctattttctcggtttgatctttcaacctatgcgtgcgggaacaaagtatcgcacggaaattcgttgatacatgtgctaacatacttgcgtgaatacattacacgcacaccctacaaagtagggaataaatggtacaagaaatatcacggagtaccatctggtagtatgtttactaacatcctagattcaatgatttccgaggctgtaatacgatactgtcacaaagactgtggacagattgatgtgtgtacctacggcgatgacactcgctatagatgcaagtctaacacttgcacaagtcaacgcatcgtagcgcggctaaaggagtcgtttgggatgatagctcgtgatgaaggcacattccgatatggctgtttagcatattgcaaacagcgatgtttccttggcataccatatgtcacaggagaatggataatgaacatcttatcatgccttaagtcacgcaaatatatccgagctgtcgcacaccaacttaaacagccaccttttccactacagccgtggcaaaaggaggaactcggtagcacagttcctggcaagctcccagctagactaaagaaatatctaaaggagattcaacctcctacgaaacatccagtctctggtttgagcaaccaacgaagctgcgaagctcaaaggcgattactacgcctgatctctccctaa

SEQ ID NO: 1539 - DNA, 1617 bp, Laodelphax striatella associated partitivirus
  source 1..1617: mol_type = other DNA
atgactgattatactttcgacccaacacctaacgtcttcgttgaggggtctcatttaattgacgaactccatcttagagctggacactctagggtagccaccagcgagggcgtgatccccagtcaattcaagtctgacacattgcgggaaattgcaaagtatggaggttactccacttacaatgtccaaagcaataccgacccctttgtgcgcgagactttaaaaactttttctcgagatatctacgaggacattcgtggctacacccgtcgcccagagggcaatatcgggatgtataaatcactgttaaagttcagtgatgaaacgaattcttttgacaagctgaaccgtgtacaacggcgtgctatgattggagctatcggtaaggctcgcaaggccttccgtctacctctgaagcgtgaaccgctcgactggcaccatattggacagtacctccgccgtgatacggcagctggagttacgttcatgggtcagaagaaaggtgacgtgatggaggatatctaccatgaagccagatggcttggtcaccgtctaaaacaagacggtcgtggacgtttcaatcctacccaggtcaagtttcctccttgcctggctggtcagagggggggcatgtcagagattgacaacccgaagacccgtttagtatggatttaccccgctgagatgttagtggttgaaggtcagtatgcaccacgcatgtatcgcgactacatgtctgacccctattctccaatgcttaacgggaagagtgcgcagcgcttgtataccgagtggacctgcaatctaaaagagggtgaaactctgtatgggattgatttctcatcctttgacaccaaagtaccagcgtggctaattcacgtggctttcaagatacttaggcagaacatcgattgggaatacttcgatgggaagaaagttggaaagcgtgaatcgcagaagtggcgaaacgtttgggatgcgatggtgtggtatttcataaacacgcccattttgatgcctgacggacgcatgtttcgaaaataccgaggggtaccgtccggatcttggtttacgcagatgatcgattcagtcgtgaattatattatggttgattatctagctacctgtcaagaagtcgagattcgaaacctcaaggttctgggggatgatagtgcattccgttcggggtcggagttcgatctcccgaccgcggaaaaggatgcgagtgcggtcggaatggtaatgcatccggaaaagtgtgagaagacggaggatccctctgaattcaaactgcttggtactacataccgagataaccatgcataccgaagcactgacgactggttcaaacttgctctttacccagagtcagctgtgcctacagttgacacgtcgctaacgcgactgatcggcctgtggatagggggcgcgatgttcgatcgtgtcttctgcgaatacatagaatacttccaacgctgttacccatgtcctgaggaggggtggttttcgaaggaccagcgacggtggttagaaattgtattttcaggcaaagcgccacgaggatggactaccaagagaagtctcttctggcgttcaatcttcttcgcctacgggtga

SEQ ID NO: 1540 - DNA, 1755 bp, Lasiodiplodia ziziphi partitivirus 1
  source 1..1755: mol_type = other DNA
atggaatacttaggttctttgctctcgaagctctcaatcttcgacccccgagacagaaactttctgtttgtcggataccgcaatcccttctctgtgttcaaacctcgttcgaaagaacatgacgaacacgaatccaccgtccttgactcgctcaagcgacacctctacccttgggactacgatgaagtgctatcatacactatcacgaccccaaccaacgatgacgttgaaaaggacttcttctcaggagacatcccaaaccaccaagttttgagagactcccactacttgaacgccctggacatcatcatcactaagtttcagccacctcaacaggttcgccctgttcactttgccgatctcaggctttacccctggaaatggcatccctctgctgaagcacctttcgccgaccacgcgaaatacctccgaatgctcgaacaacaataccaagccggacagatacctgaccgacgaccaagcttcggaaacctcaaagatcttatctttggtgtagttcgccaacaactgcacaagatcaagcatggcttagtcgaccccgacgcctacttgtactacttccgcacccacgccaaacccgctctcgttaaacgcgacgacatcgaccccgacactggcaaaaccaagaacaaagttcggatgattttcggtgcccccaaaacgtttattctcgcagaagcaatgtttttctggccgctgtttaattactatcaaacacacatcggtgcctcacccctcctctggggatacgaaaccttaaatggtggatggcttcgactcaacgaagagttgaactgttcattaatcaaaggttctattttaatggtagattggaaacgttttgacaaatacgcattattttcagtcattaccgacatcatgcaaggtgtacgttcttatttcaatttcaatgccggttacattccaaccacaaccgctccttcgcatccaaatcttcaccctctccatccacaatggctcgagaacctctgggactggacgtgctacgcacgcttcaacatcccaacacttcttccttctggaagagtgtaccaaagactacacgccggaatcccttctggtatgttcaccaccaatttccttgactccatgtacaatggtactcaaatattgacatgtctttcttctctcggcatttcagtggacctcgacgtcttcatcaaactgatgggagacgattcactcacacgaatactggtcatcattccaaccagtcaacatcttgacttcatccaagcgatgcaagacaaggcttccctctatttcaatgcacaaatttcaattgaaaagagcaaaatgagcaaccggccttatggctcagaagttctatcgtatgtcaacaacaacggctttccagttcgcaactacaacgaactgctagcccgtctcctctacacgaagtcgaagcgaccgcgccctgaagtcacaatggctatcagtattggcatctactatgctagtgctggcaattgttcatacttacgagaagtctgcctagatgtatacactcgttactttcttcaaggctacagagcagacaaatccgctcttagcagttacttcgacccaaatttcttcgattccgtagatattgatttcgataactttccctcgcgccaagacgttcaaaaacgtctgactactttctctgaaaggtctgaaaagcgatcccgggactactggcccagctggtacttcctcgacactttttaa

SEQ ID NO: 1541 - DNA, 5610 bp, Lentinula edodes partitivirus 2
  source 1..5610: mol_type = other DNA
atgttttatactttaccacttgtcgtcttcttccatttgctgtcttccgcagcggggagccttaagctcaatgctgagtttatgctcttcgctggttttgtgacttcttgttctacttttgtccagactgaacctttttggtgggatgtcacaatgaatgtcgctgacgccctttctttggtttctgtctttacttttgcccggttttatgcccatggttttcttcgtgttgtcaatagagaaaatatcattccccttgtcgactggtttttaggaatgggtcatatggtttatttttggtttattttgtatggggtcttaactgcgcatgggttagttctcgttttgttgatgtctctacctcttgtgcaattttggtttcttatttggttctgtattccccttttgatcatcttggatttttcctttattttacttttggttgacatgatttatcatgttttctttggtcatccaattggttctgtaaatgctccaagatccattttgattttgggccgtttggctcgttctttatttattcatcttggtcattttgtctatcaactagctcatccccgtgagtttatcattgggtcggttctttttgtgaaattattggtttccgtcccacttgagttattaacactcatctttagggatggtgtgacggttaggtctaatgctaggttcaggcatgtgactttaaaattttcttttggcctgaatttggttttatttcatcttttaaattttaaacttttgttctggctttgtgttatacccgttgtcagctgcctttcatatggctctctgaccttgtattggttatttggcacttctgtcatcaaccccattgttttggggtttttgaacaatcttcttgtttttgttgggtcagatttgtctgctgtttcaggcttcctctctgatgacctgcaagatagtcttttgggtctgaggctttttgttcatttcaagactacctctgatgtcatacacgtcagagtgcctggattggatctcattgtggatccttcttttgatttgaggtctgcctcaagaccaattaaagataaattattcaagattttcttttcttctaattctaacttaactttgacacctatttatatggttattcttgggttagtcattttcaggttttgttttattaggtccattcgttttgtccggcccgtcttcagagcgcctgtcgttttctttgaatgtattatattgatgtttattccttggctgatccccgatgtcgcttatgatttcgtgacttacgggttttataagttcctggaactgttggtgcatccgaagtttgatttgtggatcgaggtcaagaaatggcttcgttttgctggtttgggctcttttgtcggaatgtcttatttatctggtcctttggaaggtcaattacaaggtggcttggatgttgaatctcggttgtctcagatttttgtgctatcttgggttagtatgacccgacgtagtgttttaaaatttgtagagcttatggatcaagttcgtcttcctgagatggtacaagccagctataaccctccgagtctggacagcattagatccacatatgtgtccctccagggtatgggttttccggtcgaccaatcctttattgagtcgcttgaacgaccagaaagtagttcttatctggcggaatgggggtcttggaggaattggatgattggtacatctaattttaagttgggttttaggtcagtcgccaccactcttcattcttggttgcctgcaaactttttccccgaagtgcctggttatatacattctgcaacttttactggggttgttgaggagatcaccgccactgctcgttattggactggtaatgatttaaaatcattacccgatgggtccgatctcgatgagttggtggaggatgtttggactggtgttaaagcccagtatgataaaagccaattggctacttttgatgagatttatcagaagtggactaaaaggtttaatatgggttatgggtttgggaaaattggtaagaatggtcgccttcgacaattgacccgccaagctgtcattgattctatgggtggtaagaaacccttccttaaaatttgggaaaaagtattttataacgctcaaaaacttttgatgcctagtccggtctttaccaaatgggagactttgaaacttaagaaggctctctcccgtagtgttcggacggttgtcggtagtgcgtttacacaccatgtgatgacaactgtctttaattatagaccaaatcataattatcatccttgggagactccgagtaaagtcggaatgcccattaatggccaaaattataatcggttatgggagagtcttatgaggcatgaaaaagtctgggctggtgatatgactgcctttgattctacccaagcacctgttattttatctgtctgtgcagaaataaggaaaaaagggtatacctttcacactgactatcatcgtatttgtcagttgattgacatatcctatgaaatgctccgggaccaacctatggcttttaaaaattttggtgatatagcgattaaaacccagggggcaactactggtcatagttccactactcccgacaacacaattatgttgttggtaaattacatgtatgcttggcgtcgtgttactgggcttaggtcccgtgagttctttaattttaacaccctggtcaattttggtgatgatcattgtcttggttatgattctgtttttggctggtcgcctgatgctgctgttaaggctatggccgagcttgggactatcatgcgtgatgaagctcccggtcaatcttcattgccagttgaaggtaaactccctcctggtaagactgatttccgtgatcaagactttgcttttctaagcaagatgccacttcctttggatgcttctattagatctgagttggctgcagctggtattggttgtcagctttcttttgccacttgtcatgacaaacgcagacttctaggcaaggtcaaagggcaggttcttaaagctaagggtgccaatattctttcttcttatgatgctttgataagttatttatatttaactgctcatcaccatgatgtgtatttggagatctcaaagaaagccacctccatgtatttgaaggtttgcaatcaggtccgtcgttctggtggttccattaaaaagattcaacgtcccccttcttataatacagtcttaaggacttggtaccttactgaagcctttccttataagaatgacgagcttgatgaaaacgatgaaaatcttgatcacatcttcatcatgtcttctcctgatgcttttggggttttcgtgcgttggatttcagatttcccgacactcttatcccctcgttataaaaatgtgcgatgggctgattggatccaacaaaagctgtgcgatcatcttgcttggcctttgaccttcgtcgcggctgcaaatggagtttcaaatgatctctctactgctaaacttttattgtctcggtctccttacagctttcttagaaatgaggccataattattaatgatactagtcctgatgcttttggtcgaaatttagtccgacattggttgtatcttggatttagtagggttttcacttataggaagggattttctcctttagacttaattcgcctttttgattccttttatattaatgccgtttttattttgactggcagaatcacccaagttgcagttgagttggatctccacattttagacaccttggttattttattacttaataacgtttttattgagatcccgtttcctcctgttctctttgacctgttatctccttctataatcattgcaaggttattaacctttaccttttctttaatccagcctgccggttccattgattttcaatctctggatgagcaggttcgacatttaatcacccggccggatgcctcttttgtattatctgcacctacaggtgttgggaaatcaacaagggtgatgaataggattcaggatctaacgggtttgaagttgacggttgtagtaccccgtcaagctgttgtgttgaacgttggcaaatacatgcagactctatatcctaattctggcatcggtttatcttgtgagggacacactttcgatgtaaatgatcgtatagtgtattgcactgcacaaagcttctttcttaatgagaggttgcgtgacccttcaagattaatggtcttagatgaagctcatatttacgagcctcattatattactttaaggtcgttcttggctggtcctgcttacaggaaaatctttgttactgctacacctttagatgacttcaacttgcctgttttgaaaatacctgctgtttcttcttttaatgttatctctaagactatttctgattcttctttagatgcatatttaaaagcagcttctggattcgctaatgatagactcagcaatgagaagattttgatctttgtcccaacaattgcacatatggacaggcttataatgaatatccggcatcgttccacccgtatctctagcaaacatcgtaattttgattctacggcgacagtttttgtgtcgacttctgtcactgacgctggcgtcactatccctgatgtttcttttgtattatcacctgatttggatattggtgttagtgaagccatttcagttaatgaagatccagctattacaacttatttctttaaattatcaaaacaaactattcgtcaaaggatgggacgtactggtagaacctgtgatggtgtctttcttctttttgagattgtcggtttaccaatatctgacagaaaatatacttatccagatttcatatctaatttggcacctgcttcacagtttgcttcttccttctttcctcaggatgtcttgcagactgttcctgataatatttcagccgggttggcaacttatgacatgaatcgtgtcgcttatggcactttgctccgccgttataatgaggcaattgcagatgcatctggttatcttgaatattggaatagacgcgttcgtgacatcattaatcacagacctgctaaacgattgaaccccatggatccagatgaactacccattgatgattggaaatattctgaggtccctgaggatgctgatccaattgcacccccggttaaaaaggagccttccactatgcctagaacactttctaagatcaatgtttcgggttctggttatctctgtggttcacgtgcgcttagaggattaatttatacacattttaatgttttattctctgagcaactcatgactgagttgttgcaccaaagaacgcaatatcaggatttgaactttttccattttgatgacatccgtgatttggcttggtatggtttcagactaagattgacattagattcctccctaatgcctaattatacccacccctattttatggatggccctctaccagatggttatagagagggtgttttatttttggagcatgcccattacaactatcttggttatcctgttgaagggcatgacactgatggaaggattcaggaattcttacaacctcagtatcttaatttaaacccagtctaa

SEQ ID NO: 1542 - DNA, 2121 bp, Lentinula edodes partitivirus 2
  source 1..2121: mol_type = other DNA
atggctttccaacaggttcgcaactacctccaagaattccgcaacaccgtcaaactcgaatggaacatctttaacagatattccctcaaagattcagacgccgactaccccgtctccgactccgacctccgacgacttcaaactggcttccgctctcgctatgaatcagaacttactgatgaatacaaacacaattatgaccagctctacaagtccttcgaactcaaagacgccacatccggtttcaacttcgaattttatgaagactatgaccttgctcgaactcctgatcaccgccaacccgttcctggtatccaacaacttcctgtaaaactacactctgaacagatcgtcaccgctgacgcaactgtacccgaatctggctatgcactccatcccaagatccacagacttgtttaccgacaatacccacagtacatcacgcacgttgaaaaatactgccgtccactcggaactactgacgctacattctctgacttcaacaaagaacaaaaagaataccctcccgtccctaccgatatgatactccaaattgtcctcatcatacagtacctcctcaatgctcttcccttccgacctatgcattatgttgacaccttcttcgcaaagatgcctctccacacaggcactagctacttctaccggcactcatactccatgagaacacacgccgcatacgcacaccctgcagaatacgcctccaaacgtacttccaaaggctatttcttgaactccttcacagaatgggcccgcaccgtcgttcatcgtattaaagaatttggctatcctttcgatcccacaagcctctccccaaccgatattcgcaaccggttacgcaacttcttcatctcacatgcaactatgctattcactcgcaatcacatctcagaccgcgatggattcctaaaacagagacccgtttacgcaatggacactctcttcttgcaccttgaatgtatgctaaccttcccccttcacataatggctcgatccatgaaatcatcactcatgtattccatcgaaaccattcgtggtggctgccactatatggaccgcgtcgctcaagactaccgttcatacttatgcatcgactggtcttcctttgaccaacgcatgccctggatcatcgtagactcatttttcacagtcttcctccctatgctcctcattatctcacatggctaccaacccacacatgaatatcccacataccccgacctcactcctgatatgctattctctcgccttttcaatatcctatgcttccttcgcacctggtattttaactgcgtcttcgtcaccgctgacggattcgcttacatccgactcttcgctggaatcgcctctggtatgcttaacactcagtacttagatagttactgtaatctgtttctcatcatccacgctctcttccacttcggctgctctcgcgatgaaatactctcattttgttttttcgtaatgggtgacgacaacgtcgtcctatcccgctggacaatatctaggctcaccgcctttcttgtctttttcgaagatcacgccctcactcgctttggcatggtcctttccaaaacaaaatctattatcacgacaatgcgcatccgcattgaaatgctcggttatcgctgtaatggtggtcatcctgaccgtccactcgcgaaactggtagctcaactttgctaccccgaacatggtccaatcgacaaatatatgtctagccgcgccgtaggcatggcttgggcttctgctggcatggatcacatattctaccaattctgtagagatatgtacttcctattccttgacagcgctgaacatcccgatcaacacgcgatcgcttccatctcgaagcatctgcctgggattttcaaagtcctcgacgacatagaagaattcgtctcgccagatcgattccctgacctcaacgagatcagagatcgcttctcccactggcaaggtgaactcgaccccaacaagaagtggtcccccgctcatttcacggaccctcctttcgtcgatctccccaatcgtcaaacaatgatggattatatgttagcaaataacatacaattcccagacgtagaacgtctttttgcttga

SEQ ID NO: 1543 - DNA, 1692 bp, Lentinula edodes partitivirus 3
  source 1..1692: mol_type = other DNA
atgaactcactcatccaacaactctctgaccttagccttaactggccttcgcaaaatcttgccttcgttggcatcgatcccttccacggctcggcacaaccattcaaaatggacccgaacgactgggcttttcatctccagattttcgttgcatctgtcatttgtctctacgcatttctcttcccggtaaatgttgttcaactagctcttcatggcttccgccgctcccaagtgtccggacctaaagcagaacaatttttcttccgctacgacgtgcctcgacatgacatcgtcaaagataaatattattatgaagcaattcgtatagtgtgcaattggttccgaccaaaatggaaaattcatccggtacatttcactgaccttcgctggtacccttggaaacttgacacatctgcagaacgaccgttctcagttcaatatcgtcaccttggctctactaaattcagcaagctttacaaccttgtgttcgaatacactcgcactgtcattcaccgattcaaagatggactcaccttcaactacgatcctatcactctacacgtcaaacccgcccttgtatttcaatgggccgaagacaaagtccgaactgtctggggtattccaaaatatctcatcttttctgaagctatgttcttctggccactattctctcactaccatactgagaggcagactccactcctatggaattacgaatcacttaacggtggttggtatcgcctcactcatgaatggtttaaacacaaaggaatctacttcaaccttgactggtctgaattcgatatgcgcgtttacttttcaatgtggctcgacatcatcaacgaagtctccacttttttctgcttctgcggtaagtactgccctacacgtacctatccgtcaccacgaacctcacctcaacgcatcacaagcctctggaatcgcataaccgacatgtacttcaacatgccatgtgttactcctatgggtaatgtctttaagcgactgtacgctggaatgccatctggcatcttctgcactcaattttacgactccgtttacaacggcgtcatgattgtgacctgtctgctatctctaggcgtccctatccccgaggatttcccaatcaaactaatgggagacgatgttttgttcgtgttactcatggacttaccatttgaacattggcccgaatttctcgaggccctagcttctgaagccctctggcgctttggatctaagctcaaccctgataaggctcatgtatcaccctcgattcaaggtgcttttgtacttggatactctaacaacaacggactgccaactcgcgaccccgctgagttactggcaaaactgctccaccctaagagtctccgtgacacacctggaaatctgatggctcgatcgattggtatctactacgcctccgctggcgacagaagattccgacctatctgcctacatatatatgaccatttcgcaagacttggattcaagccttctatcaaaggactagcatcactgttcgacccaacaggactgcgtcttactgaagaagacctacaacgcttccccactcaaactgaagtgctcgctcgcatcgccaaaccttctgcccgcaaccccgaattgcaagcaaagtactggccgagagaacatttcctttctgaagctggatttgttcaatgttaa

SEQ ID NO: 1544 - DNA, 1734 bp, Lentinula edodes partitivirus 4
  source 1..1734: mol_type = other DNA
atgtgtttttcaacaaacctgagatacctaggcaagtaccgcccttatggcaagccatggtccttcagaccccagcagttctccaaatcaggagctcgacagcaggactttctgagacgtaccattctaaaaggcttacacaatactttgcccgaagagacagtttccaacattcgtgatggatactatcgctcaccgaccgacccccagtccgccgaagatgatttcaagaagacagaccaaccctatcaccctatcaagagagacagacactaccgcaaggccctacgtgtcgtggaaaagatgtttcgtccaacaagacgactcaaacccatccacttcgctgacctccgcgcatacccctggaccctcaacactagtgccgaatggccctaccgtggtgacaaacgatgggaagatcatgtcaagcagaagtaccgtgaaggagaagtagattcaattcacctcaattttcacaacctctacgacgaaatatttgacgcaaaccgctggaatatccaccttattaaggatggaaaggcccccttctggaaagatggcgaacccgttccttatggattcaccttcctacactccagatctcatctcagaagaatagatcaagaccctaagatccgtgcagtctttggcgttcccaagctcctcctaatggcagaaaatatgttcatttggaaccttcaacgtgaataccaaaacagaccgctacataccggacccttactttggggttacgagacgttccgtgccggatggaataagctagcttcaagactaagccgccatcccataaaatcaatcatctcaactgattggagtggattcgaccacaaagctcttcacgagctgatcgatgacatccatgaaatgtggagaaattggttcgattttgaccaaggctacgaaccttccgaaaacgacgatcattcttacaaatattcgaaaaccgaccctctgagactacagaacctgtgggattggatgaccaacgcgatcaagaagacgcccatcattgccgaatctggtaatatgtatgagtggaacttcaatggaattgcatctggtttccaacaaacccaactgctcgacagctttgtcaacgcagtcatgatactcacctgtttatcagcagctggaatcaacatcgagtctgaacactttcaggccctattccaaggagacgactcaatcatcgccttcccagaaatagttgatttccttcctttcttacgccgtgtttccgatgaagccaagcttcgcttcaatgccgacatctcccctgacaagacaactcatggagagtggttcgatggaatcgaagtattaagctacacctatcaaggtggtctcgctagacgtgaccccgacgaagtgttagcccatcttctctaccctgagaggcttcgaaacgacgaagaaaccgccgccgcgtgctgtggacttgcgagtgcactaatgggatgttcccttccccactatcttgctctcaaggatatctttgtttttttggttgacgtactcaagatccaacctcgcctacccaaggctgaagaaaagatctttgaactaatcgcgctaccaaagctaactgacttcccgacctttgaggaaactttccttcaaaatctggatatccgtggcagaactgaggcccaacgacaacaactgtggccaactaagccgagaggtgaaaagaactttcattttcttgagtga

SEQ ID NO: 1545 - DNA, 1557 bp, Lestijarvi partiti-like virus
  source 1..1557: mol_type = other DNA
atgattgagctggagaaacgagccccgtttccctgttcttactttccaccgagagtaagcgtcaatgcatgctatgcatttgacaagtgcaatttgaaagagaaacgagtagaattgctctctaagtatcaaaggagttgggtaactaaggataccctcagacagtcgacccttggatatagcagaatcgagtatgctaagaaattcgatgacgaccgccttttcaactgtatcgaatcagtccgcagcgagttcaaatatgcgttaagcaaaccgctaacgtcctggaccatcgagaaagtgatgaaggatggagacatgccgaaaaccacgtcacccggattgccttacatccaacaaggctataagacaaaactggacgcttggaaggatgaccaagctacgattgcacatgcacacgagttaatacggaaaggacactcagtacagatgcctgattgcgcagcgttcgcgcgcagcattgtaagtgagaaaccgaagaacaaagtccgtcttgtgtgggcttaccccctaagcatggtacttctggaagcgaagtacacgcagccacttttgcaagcaatgactagtcagaagatcggaacatcagttgcatatggagcagaaacgatgagaggtggtatgttgtggttgcacaaccaacttaccaaaatgccgtcgcagaactacgtatgtatggattacagcgctttcgatcaaactatccccccttggctaattaggatagcctttgatatcttggaagagtgttttaccacttcggaagttgaggacgttgatggaatgcaccgcaccaacgcattcgccgtcgcccgtgagtggaggcaaattaagcactacttcattaacacgccactgagaatggaagatggcaccaggtataggaagactggaggagtaccgtcaggatcatgtttcaccaatatcgtagatagtatcgtcaacatgattgtaacccgttacgtgatgagaacgtgcactggacaaatgcccaattttctcactgtactaggtgatgacagcgttattgcaacgagaggactcgttaatctcgacgacatcgcaaggattgcgaaggacaagttcggcatgattgtcaacgttgagaagagttactggacaactcgagttgataacgttcaattcctaggatattacaatcattatggctacccagccagagacgaagagacccttctcgccggtctgttactacccgatacgtcagtggatgaaacactggaactaaccgcagcacggtttctcggattatcccaagcaagttgtgggaacagcatctggatcccattgttaaccgagtttctttttgctgaaatgaaactacggggaaaggaattcatcgtagacgctcataagctttatcacattcagaaatccactggatggttaccagcagcaggtgaaaagcccgagcctttaccaggaatccaagatttgcggaaatcaatacttcccaagactacctgtctcaagtttagtcgcggcgtagacttgacgaataatgaaggagtctga

SEQ ID NO: 1546 - DNA, 1428 bp, Leuven Partiti-like virus 1
  source 1..1428: mol_type = other DNA
atgaagtacttaggatatgcacccggcttcgggatgcgacccggttctgatactttatcaccatacgctgttgctgcctttggacctcaaccccacctgaggccaagatctcaactatcttatcgtctagtagaaaaagacttgatggaaatgggaagtaatcaaaacaccttaaattttcaagatccattaattaaagaagcacaattccatactgctcaagcctttcgatttgatactagagtaaaaccgatccatttgaatgatatatttgatatggaattcgagttcaggcactccagccctgggatcccatggcaaccagattacgctacgcgtggcgacgtcatggacgatttcactgctagaaactccatcagatggttttggcatagaattaagaaaggagaaaaagtttcactccctgataccaaggttttgtatcgcgctcatattgctgagtcatccggcaaacccaagattcgagctgtatacgggtttcccaccaccattactttggctgaagctcaatttgctgtacctttgatcgctggatttaagaagtatgatactccactatcttaccagtttgatatggttacaggaggagctaacaaattacgaggtcagatagcaaagttcaaacgctacttgtgtcttgacttcaagggttttgataaatccgttagtgctgatatgataagaatggcgttcgatgttttagaacagaacattaattggaccgaatatcaaaatcacggtgtaccagacgcctcaaggttgtatagagtgtggcagtcactcatcaactactttatcaatactaacgttagactgtgtgatggtcgaagatttttgaagaacgctggaataccaagcggatcattcttcacacagcttatcgactctatagtcaaccactttctgctgacttacgctttcttagtgttaaagaatcgtcgcccacattacattcgggtctttggagatgattcagtcattgcagactctgacttcgtacatatttgtgacatcgctagagtaatgtatgatcttgggatgatgatcaatctgtcgaaatcgatccagacagaggatatagataaagtcgaatatctaggcttctgtatccgtggtggttttccacatcgaggctacaacaagtggcttgaaagcttatatcatcctgaacgagctgatttggaatgggatgactttgcaagtcgcgcacttggcttgttttatgcaaaccatggggtacacgaacgattcgatgagatgtgtagacaagtaattggatatagacctttccatatacgaatgtccagagatttcaaacgcttcttagctggactcggaatatcacattctactatgagtactgacctcccagatcggatgaggttacttttctctctcattggatag

SEQ ID NO: 1547 - DNA, 1419 bp, Leuven Partiti-like virus 2
  source 1..1419: mol_type = other DNA
atgacttatgctttacagaaatcatgtgggttcggtcaacgattatttaagaccgtaaaccctagtccttacttaaaccaacttatagatccaaatcttggtttagcacgtagtactgtaacaatacaggcaatccggaatgatgtacttaaattcggaaattcaacaaaatacgattttgccaatgatggttatatgactatggcggttaatgcagcttacagagcttttatgctccctcaccctgtgcggatgatccatttaaatgatgtttttactttagatttaccaatatggaaatcgtccccgggtttaccatggcgtgaatatggttacaaaacaaaaggagagctccgccatgacgttgatgctattagacagattagaaaattctggcatattattaaacgaggtgacaagatgcatccgcccgattgctgtgcttatgttagaagccacgttacagacattggagaatccaaaatacgtgctgtatggggttacccagcaactttaactctgggagaagcagtttttgcaataccattaattgatgcttatcgtaagtgtggaacaccaatcgcttatggatatgaaactgcgttaggaggaatgaagaaattatacaaagaagcacatggcaaatattttgttgccattgatttttcaagttttgataagaatgtaccaaaatatcttattgatgttgcttttgatatcttccttcgtaacctcgacttatcatattatagagaccacggagttgcatcagcagataggatgcaaattatgtataattatatacgtaattattttattaatacaccaattcgcctatgtaatggagaacgttacaagaagacttcaggcgtagcaagtggtagttattttacacagcttgttgattcagtcgttaattatattttaattacttggcttactttgaaatgcaaagccagtattgactggataaaagtcatgggtgatgattcaatctttggtacagatacactcattgacttggatgacttccaagacctagcacacctattaggcatggaaattaatattaagaaaagtgcagtgtcaaaatatctatcaaatttgacctttctgggctatcaaattaatgatggaataccatcccgtccattagaaacatggatggcgtctctgttatatccagagcacccagatcgtaattgggacgatgtggcctcacgagctctcggcctattgtatgcaaatgcagctgtcactcaaaagttcgacggcctttgcagaatgattgttagtctccgtccctacgacttgaatgtatctagaggcatggcccgatatctatttatgcaaggaatttatcatttagaaaaggagccgcctgatatgttctattttatgagtcgattacatatttaa

SEQ ID NO: 1548 - DNA, 1578 bp, Leuven Partiti-like virus 3
  source 1..1578: mol_type = other DNA
atggaaccacttccgtctaagaagggctttcaaatcgacacacgacaccacggtttagatcgtgatgcctgcatgtttgcgaatgctgcgtttggtcgtcaccaagttgaccacgcaattagtactttgcatcgttcagtagctagtcatgaggagattaaagctgacattctgtcttacgaccgcaagtatatcaattccaaagtcagacagactgataactatcgtatggttttacagtccgtccgagatgacttcctgtcacaggagaaacttatacccttaacattgggtggagcttgggaacatcctgagtttcctaaagataagtcacctggattaccatggacagagagaggattcaagactaaaggagcagtgttagatgatacatctgcacgtaatgaaatacttggccgttgggacgcgataggaagaggcagagacacaggactaccagatacggcagcgttcttcagagcgcaagttgttactaaggacaaaaacaagatacgtggcgtttggggcgtaccattggatgtaatatccgaagaggcgcgtttctttctaccatacataaagttcttaaaacaatctaatgcaccaatagcataccgattagagatggctaccggaggaatggcatatatcgacgatatgattcgccaccatagggggaaacccatgatgatgacggatattaaagagttcgacaaagcagtaccaccgtggttaatacgtgatgcttttaatatcattttcgattccatggattttgaacatgtaattggcagtgatggtaatatttggaatgtcaattcggataggactagaagaagaataaaccgactgattaagtattttattaatacaccggttcgtttaccctcgggtgagcgttatcgcaaatcaggaggtgtaccatcaggatcaatgttcactaacatcattgatacaattgtgaatgtgattttgacgagattcagtgtctacgagacaacaggtcatctacccctaggggagatgtaccttggcgacgattcattcgttatttgtgacggcgtacttaatttgagtgctgtagctgaagttgcacaagagaactttggtatgacagtacacccggataagagctatgtcaccgataatccaatgaacgttcaatttctcggttactacaataggagaggactaccttacaagggacacgctttcttaatagcgtcatttatatatccagagcgatatgttaaaactccactcatcagaacttctcgtgcaataggccaaatgtggtctactatgcactcaggaatggcagcaccgtggcacagactggttcaacatatgttgaaatattacggtatagaaccaggcgacgtgtatgattttatcactacacacccgggtcagtttcgatatctgacaatgcttggcatcacccctgagcaactaacgttaccagagaggatttgtgaacttgtaccagcgatagatccaccatgttatcctttacgtgattacgtatatgtagctaaagacacagcagatatcttttcaagatcagtagatttgtaa

SEQ ID NO: 1549 - DNA, 1365 bp, Leuven Partiti-like virus 4
  source 1..1365: mol_type = other DNA
atggctttcaataacttggcattgccacactatgctcgatactttaaaactcaatttacacggtacagaccacaaccttccgacttcaagtcgaaagtgttaccgtacttaacttcaaaaccaaaccgaccaaaagatgcagtttatctatctgctcttgcaactgttcgacgcctgttcgctcttccggctaaggtcaatcctctccacattaacgattctattaaatactttcaaaatggagataaatcgccaggcctaccttatactgcaaggggtataaaacaaaagcgagacgtccctgtcaacgaaataaaacagtatgtacacaacgtaaaatacggcatctaccaacattgccgaactccctgtactggtgcagctcgtacaatgatttcaaagagtaccgagaagaaatttagattgatctgggtttacccagctcatatgacgctagctgaaggcatgtttgctcaaccattgatttgggcttaccaacgattagaggggccatatggtatatggatccaatatgctcgaggagacgcaaaacgtctcatggcagcgaagcgcttcccttcccagcgatggctcggaatggattggactgcttttgacgccaacgtaccgtcatggatgattagagatgcttttcagattctgcgtgaacagatggattttagtaaatatcaggagagaggtgttccaacacacgattttactcttgatactctatggaatcatttggtgcattatttcatcaatacaccaatcaagttgcctacgggtgaagttttgaaaaccagaagaggcgttccaagtggatcgtactttaccaacattctggattctgtcatcaatgcaatagctgtacattactgtttagagtcattaaacgtccgctactctaaatgctggtttatgggtgatgactccctagtattaatatcaaaaccggctcttaacatcgacgacctagccagaatagcttttgtgacgtttggtttcgagttaaacacgagcaagtcagatttttctccacacagcgtcaaattcttgggttttactctcaagggtggtcgaccgtatgcagactacgataagctggttggcatgcttatctgtcctagttccagagatgtctgtgaacaggatttcatcgctagagcgagggctttacaactttcctgctttggcattggctgtatgcgttttactgctgagatagatgagtttttaattcgtgttggtcacgaaactgcttatcccagcttgcaccccaagaatgagcttgtctccaaacttcaacagatgggattggccgattggccccctctgtctaaagttatggatgctgtgatgtga

SEQ ID NO: 1550 - DNA, 1605 bp, Leuven Partiti-like virus 5
  source 1..1605: mol_type = other DNA
atggctttcttacgtacaaaaataaatccccgatatcatactattgatattacttcttttgaatacccgaggattaccttggatgtcaaaattccgcttatacagcgaggaaccattttagagagtggaaaagggttttcattcaaactcgagaagccctccgtctcgttcaagacctatagagccctttgtgaacacgggttaaaaggggaagctgatagagtgctcagcactatgaggagatcatttctcactccggattctatctggtctggagttttgaaatttggcggcattaccgcgaagaaaacaacgtttaaaggatataacaaagcattacttgatttgagaagagaattgaatattgatgataagatacaaccaatttcaatggatgaaggatttccgcatctacctcaatcaacgtcgcctggattaccgttcatacatactcaccctggacttaagaagggtgatataataaatcggtattcgcataaattgaagaattattgggatagagttggctcaaaacagaagaacatccctttacctgattgtgccgcttttgctagatcccacattacgtcatctaaagagaataaagtccgccccgtttgggcttaccccctatatgtaatttcagaagaatctagatatgttgttccacttcttgaaaagattaagaatcaggaatgtttagttcatactgcatatggaatggaaatgctgaagggtgggatgacctggttaaaccaccagctacaaagagcaagaaagagaggagctgaaaagatgttgtgtcttgacttttctgcatttgatgcctctataccagcatggttaatacgcgatgtatttaatatcttaaaagagaagttcgttcttacagaagcggaccaattaaaatggaaacttatggtaaactattttattaacacaccaatacgtaacatggatgggagacgattccaaaaggaacatggcataccttccggatctatgtttactaacatcattggatgctgtatcaactttgttatgatcaggacaatcctagatgctcaagttaaagttgaattcttaaatgtatttggtgatgattcaattacagctgttaaagggatagtaaacattccccaaatcgccgaggatttcaaaaacatctttggcactataattaatgtaaagaaaagctactacactacacgccttgaaaatgtacattatctgggttattacaattttcatggagacccagttaaatcaactgccgagctacttgcttcgatgttgtatccacagtatttgaaagatgactggggatatgttctcgccagggcattgggatgtgctttggcgtcttgtggcaataatgtaaatgtattcattgctgccaggggatgttatattaaaggaaaaagagaaaatgttgaaaatgttcccgtcgcactacgattaatcaagagtgacagccgaatgaaacggcatctcgacgttatgggatgtggagattggaattttgatgagcaaatgttctggaggaatgagaatttctttcctagactggactgcacaaagctccgcatgggaatccaacattaa

SEQ ID NO: 1551 - DNA, 1503 bp, Lichen partiti-like RNA virus 1
  source 1..1503: mol_type = other DNA
atggattctaaaataaactttcccgaggactgcttctattgtaagaagtaccacggaacgaagaactgtctactaccatttgatgtagtcaggaaaattcaaattccaaccgatttcgctttggcaataatggaaattacccatctacatgacgtatatggtgattcaattctaaagcataattctaccatgacaaaattgtctgatgacaccgaacagtatgaacttaatgagagaactcttaaattcaactctgtggcaattaaaaccggaaatttactttctaaggctgatctacctaatgaggagacacgattagaatatcataattccgaaacccaaactgaggaatcagcgactggcgcagccgtaattggtgaatctataggtgaattaaaaccgaaatcacaaactttaccgtataatgtgaaaggtaaagaaattggcaaatcatacgctaatgccttacagtcaacagaatctcgatcatcttggtcagatcaagttgaagaggaaattcttcttaaagagaaagaagcctctgacaaggtatgcgaattagccactaatgtttgcaatgagttatcattgccaacacaagagaatgaaggtcatctatttgatgaactactcaaaataattaaactttgcagaaatatcgctaagatcaatagatctacgattccgtcaaagaaattattagaatcaattctctacgagaccgaacaattaaataagtttggtactaagtacaagaagacgaactcttctaaattggatggcgaaatcgccttttccaaagaattggtcacaattcacaaccatgagcatatgttcaactggtgtgatggaatcaaatcacttcatggtgattattgtattctaaactatgatcaactaagtctacaatccttaacatccaaaagagatggtgagacacttgaagatgcatgcattgagatatttaaatcatttagatattcaaagctcatatccaaggagtcaaaagatgagattgacagtgcaattaaatttgaactggaaagacaaaattatcttgacgcttaccaatggttagcaaacaagacaagcttaaagaaaggctcatctgccttaaaggatctatcaaaagtttctcgaaagtattcagaacttgcgaagtatccagccctagatgaaaggctattatatcatattgatgataaccttaaacaaatcgttcatgaatccttgagtaatcaagccaagaacgtccctagattaggaaatgaagttaacctagaagactatttcttcaagctaaccgcatatttccttaaaactaacagaggatggaagaatgagaacagtttctcaaacccttcacatcttacaaaattacaggaacacacacaggtgatcgttcccgattcagaatccttaaaggtattccgaatcctaaaatcttctattgataatttccgaatatcatacaagaagaagtacgtgatgaacgtacaataa

SEQ ID NO: 1552 - DNA, 1767 bp, Lichen partiti-like RNA virus 2
  source 1..1767: mol_type = other DNA
atggaatacctgtccaaacttacagaacgactttctatccgtgagaagttcaacaagaacttcctctacatcggattccgtaaccccttctctgtgtggaaaccccgcactaaaggacatgatgaacatgagcacactgtgctacattacatgattcagaacatgtatccttgggactacgaagatgtcatgtcatacaaaatgaccactaccaccaatgatgatgtcgaaaacgacttcttctccggtgatattgaacaacatcaagttcctaaagacgagaactacctaactgctctcactaccgtgagtgacatgtttagaccatctcatcttatccgtcctgtccacttcgctgatcttaggctctatccctggaataagaaaccatctgcagaaccaccattctctgaccacaagaaatatctttcttggctcaatgaatcctttctcaatggcaccattccaaaccgtaaaccttcgttcgctaaccttcaagatttgatctttggcatcacacgccaacagattcacaaaatcaaagaagcagaagctgaccctgacgactacctgtattactgcaagacgcacgctaaacctgctcttgtaaaacgagacgatattgaccccgaaactggcaaaacacgcaacaaagtacgcatgatatttggcgttcccaaattaatgatctttgctgaagcgatgttcttctggccacttttcgaacactaccaagcaaatattggctcaacacctctcctttggggctatgaaaccctaaatggtggatggcttcgactcaacgatgagttgatgcgatcacacctacgatcatcaatactgatgattgattggaagagattcgacaaatacgccctattcgacgttattgatgatataatcgacaaagttcgactatacttcgacttcgataatggctacgttccaacaactcgcaacccagtttacaacaactggaaagaaaggaaacaacctcaaagattacaaaatctatgggattggacttgctacgcacgcaaggccatacccacggttcttccttccggcagactatacaaacgtctgttcgctggcatcccatcaggaatgttcaccactaacttcctcgactccatttacaatgccgtgatgctaatcaccatacttaacagtttaggcattagaatcgatccaactaactttcgatcctttgtcttcaagctcatgggtgatgactcactaacccaactacctatgttgatacctcctaatcaacacagcgagtttctactgtcatttcaaaacaaagctgatcactattttcgatctattgtttctattgacaaaagcaaattgtgcaacaggccctttggttctgaagttttatcatacttcaacaacaacggcttcccagttcgtgactacaacgaattgctcgctcgtttactatggacaaagtccaagaatccaagacctgaattgaccatggctgcctgcatcggtatctactatgcaagcgccggcaactgcacttaccttcgtgaagtttgtttctctatctacgaacactaccgtgttcagggattcaaagctgatcgatctgctgtcctcggattcttcgaccccaatattctacgtaacatagacattgaagttgataaatttccaactctttctgacgttcagaaacgactaaccactctttctatgcgatcaagtgaaagggctgagaagtactggcctagctggcacttcctgtcctactaa

SEQ ID NO: 1553 - DNA, 1707 bp, Lichen partiti-like RNA virus sp.
  source 1..1707: mol_type = other DNA
atgaagaacccacactacaccctgatgaaccccatcaacatcaaacacatcggaacaggtacaccctaccccctgcacgagagacttggtttgaatttccaatgctacaacatcgtagtcaaaggactcaacaagcacctccaagcccatgacgtattaaacgttatgtatggctatcgcagatccactatgtctgaggacaagttagtcgaagactacttccgcggaaatgttccctatcacaaagtgattaaggatgagcattactacgccgccctcaaacgaatggacgaattgttcaagccacccggcaaattgcaccctgtgcattacgccgacttgcgcttctacccctggacgctaccgacatctgtcgaagcacctttcagcgaatctgaatggcacaggaaagttgttgaagtcaaatttcaacgaggactaattcccgatacacgcatgacattccacaatctgtataacgaagttttcgttcataacagaacaacgtttcaccgtattaaagacggcatctacactgatgtccaaggccgagacgccaaatattggaatactgcacacgccagatcacatcttgtgaaagccacagacccggataaaattcgaatggtcttcggagtcccaaaactccttctcatggccgagatgtcatttgtttggcccattttcaatcaccttctcaacctcgaacagcattcaccaatgctctggggatttgagactttcaaaggcggatggtataaactaaggaaatactttagtgaatatcaccccagattgaaaaccttcctgtcactagactggtctcagttcgataaacgagctagatttgaagtcattgacgacattcactcaatatggagagaatggttcgactttagtcgatactggccaactcactggtacccagatgcccacacggacacctggagaatcgaaaacctatggaactggatgactgatgctataaagcacacaccagacaagttacccaatggtaacctatatcaacgtcagcacgctggtattgcctcaggatttctacaaactcagtttcttgattcgtgttacaacacaatcatggtactgaccactctatcacgaatgggatacgatattactaagatcgtacttaaagttcaaggagacgactcacttgtcggactacttacttccatccctgatattgttcatcaatcgtttcttgatactttcgcacactacgccgaagaatactttggagctatactaagcacaaagaaatctaagattcacaactcacttgaccacgtacacgtactaggtttcaaaaatgtgaacggccacccttaccgcgaagaacaagaacttctcgcttcactacttcaccccgaaagaggcatggatcaatcccgactcatggcacgcgccatcggaatctcctatgctaattgcggagtaagcacaagcgtttacgctgtctgtgaagacatctatggataccttaagtcacaaggtttcagtccgaataagtctggaatacctgatatgattaaatatttatacatagatcagcaacttccagaacaatttctcacgaatttacagtttccaagcttctttgacactttcaaagaccttgttagcacagaattcagatcggacgctcagaaacaaagactctggcccctagatcacttcctctactag

SEQ ID NO: 1554 - DNA, 1647 bp, Linepithema humile partiti-like virus 1
  source 1..1647: mol_type = other DNA
atggaagaggcgcaagtcagtaggaaaactgcaatactgagattagcgccagataaaggtttcccctttaatctgctacccgctagaattgaccgtctagcgcgcgatgcggcaatcgaagcatttggacctcaattagttgaggatgtcatggccaaataccatcgaagtgccctaaactatgacgacctgttagctgatctgatggggtatgatcgcgtacatagatccagcttacgaaatgatccagtgtatcaaatggtttatcagagtatccgtgaggattttattaatgaaagtgagaaagtgataccatatacaactggagcagtaccatctttacctgattttcccaagaataaatcttcgggtttgccttggaaattagaaggtctaactactaaacaacaagtagtagacgctggaggattagattccaatcgcaaactgtggcatgaaattagtttcagcagaagacacataccattacctgatgtttgtttgtttgctagagcgcaggtttgtgaatatggaacatccaaaattcgagctacttggggatatcccttcgatgtatacattgaagaagcaagattcttttacccaatactcgactatgtatctagcgataaatgcaagtttcccgttgcttacgggcttgaaatggctaatggcgcaatggctgaaatagaacgtgtagccaaaagacttaattgtaagtctataattatggattggaaaagttttgacaagaccattccaccttggttaattagagatagttttgctcttatagcagaaatgatagacatgtcacatgtcagggacgttgaaggcaaagtgtggcctgtgagagaaaatcgttctcgtaaacgctggaaacgtctagttgattattttgttgaaactccaattcgaacatcaaaaggagaaaggttcctcgtgactggaggtgttccaagtggatcatgttttaccaatatcatcgatagtattgttaatgctatagtaacaagatatattcactatcaaacaacaggtgaattacccttagctgaagtttatttaggggatgacagtgttactttcaccaaccaaatggtaaatttagacgacatgacacgtcttgctgatgataaatttggtatgatcataaatcctaagaaaagttttataactactaatagaagaaacattcacttcttgggttattataactttgagggcctgcctttcaagcctcaagatactctcattgcatcattcattgcaccagagcgtactagaacaacagctgttgaggctgcagctgcggcgcttggtcaattatggtctggaatggatccacattatgccacctgttggattactatattagactttattaataggaaatatggcgtcaccaagaacgatgtgttagatcacttaagtcgtaatctgggtcgtcataaataccttagattgataggtctaagttttaatgacatttcatggccagaaatatctaaatccagttggtgtgtacttaaagtactaccaaagaatcgaattaagaaacgtattctaattcgaaattggatctatgaagagttggcttctaatagctatgattactggcgattcatagaagataatgatgaatga

SEQ ID NO: 1555 - DNA, 1440 bp, Linepithema humile partiti-like virus 1
  source 1..1440: mol_type = other DNA
atgccattaaatagtaatacaacatctacgaatcgcggtcaacgtcgcccagaggggacggtacccgtttcaagtacttcacaagaagtaagaaatgaggctaacacttctagtgttcaatcgccaacagcgactcaagcctcagtacagaaggatcctccacggaggaaaaggtttgtgggaagaccacgtccacctcgtcaattagacgcaaaacctcaggtgcctaagcccgcttttctttcaacaacggcaacacctataaagaatgatcctctgtatatgagtgctcttgtgcctcatcctggcgcagaattgcgtcctacgtcgtctagtaagcacattcaatcaagtgctattggaataactgatgtatctactcagatatatcaagaactggttgctaattcaactggttttgctagacgcgtaccctcctccgcatttcagtgttatgctgctacattagttttcgcagcaatgctgaaaaagcatgagtctaatgggtttaacctaaagacagcggagcgagaattttccaattccgttattgatgcaaaactcaagcctcccaccatgttgacttcatacatggacggattcggaaatacaactttaccatctgggagagaactcatcttcagaatgctaccacgaaattatgttgaagatgaaacaacaggaaccatcggttggtttggcaaagtagatccacagacacattatatgtacatggaatatccaaatcttgcagtgtacatgtataggatcacccaagatataagatatactgctaaccgagatctagatcccgattggaacctaccaggcgatatcgcacctgctgaagccttgaatgcaggtttaccaaatgtaaacctattaggttatcacagcgccgaggcattgaagcctgaacaagtgcggtttcttcgagaaagtggaatgacggcaaacggcgattttgttagcgataatgatgtaataccagtaaatcttgggttactactagccgttcaaaatgaaatagatgccgtaacaaaagcagtatccacaaaactgccaaattacgccatagacggatctcaagcacagattcctttggtacatccactacataccaaagatagacgactcgagaaacatcaagatctcgaacttacatctccagttcaaattaatggagcattagtcgttattgatggtggttttgtttatcgtatgagacaccacatcacagaacaagtgcgcgagaccaataattggtctatttataacttcacacatttcacaggcgtaccacccacttggagaaacacagcgaataccattcgctcagatgaggacgaactactccaggtagcagagtttagaaccgttcctcacaatctaaaggctcgcatacatgatataggagcagcctttaaacctgtagcataa

SEQ ID NO: 1556 - DNA, 1232 bp, Lippman partiti-like virus
  source 1..1232: mol_type = other DNA
ctgaacgtgaccgtctcacaacggcggtgagcagggttcggaaggcgttgaagggcatgggtttagtcaaacctgtcgatctcgatgtcgctttcgagtggttattaagcgcgaaggaaaacaactttgctggcttgcccactatgggtaagaagggcgacgacgtagatgctttggcgagagctaaggcatgtgagagagggaagtgtcccccgcctgcgattataggacatcgtggcaagaacacagtggtggcaagagctgtttggatgttcccgttcgaatggcatatctgtgagggagctttttttattccgctgcaggaaaaatttaagcgaaacgtgcatgtatacgcagcatctaatgctgtagccagacgtgcattgttcaacgagttagccacaagcggcatttttcattcgaagctggctatggactactcagggtttgacggttcagtaggaacacaggtgataggcattgctttcggtttgctgcgtgagcatctgttgttggatagtaggcaggagaaactctggaatagggtagctacctattttgcaacttgccctttcgtgaatcagcatggtgagctggtcacaggacggaggggtggagtgcccagtggttcaatgtttactcagatgatagactctattgtgaatgcaattgtaatcgaatactcactccctgtggagcagaagaaacgttactttgtgtatggtgatgacagcgtcacctacttacagtgcggggtacgagagactgagaacctgttgaacgatgtaaaacgtagagctggtgagttaggcatatgtgttaacctcaagaagactcatgtatgtgagcccaccgccgtcactacctttctgggtcattatgacttgcggaatggtcgccctgcggatgaagtcctggcaagactcatctttccagagaggccttttaaagtagacgctgaatccttgaggacaagagttataagctacatggcagagagtgacgaagtaacgggagttttgcttccggtatattggatacttacgaaggttgccggtcgacgtgatgtcagggcgaatgtgcctagtttcgcaagaaatggggcgtcatggctcacacatgcagagctgggaagtttaaacccacgtaacttacctggcttggcgcagttcctgactaatgaagatccgactctggtgtctgcctatctgcgtataagggccgcagtataa

SEQ ID NO: 1557 - DNA, 1042 bp, Lloydbraun partiti-like virus
  source 1..1042: mol_type = other DNA
cttagcctttaagcgtacgcaatttaatgataaaactagacttgtgtggggttatccctactcaatgacggcaattgaaggattgtgtgcttatccactgcttgagcagttcaagaggggaaacacaccgatggcgttttcaatgacgtcgggtgcgttaggaacaaaattacgcgttgcatcttaccatcatgaatgggcatatagccttgatttttcacagttcgatgcaacaatctcagcgatgttaatacatgtggcctttgatatcctaaggacttggttcgataaagatcaggttgatgtggtaagtgggaagacaacaatggaagtgtttgatgttattgaaaactacttcatccacacaccaatcgtgatgcccaactcgaagctataccttgggaaaggttatggtgtaccaagtggatcatacttcacccaggttgttgattctattgtcaatgttatcgttgctggagcaatcagcgcgagatttcacctgaatgtagacaaacgcgagattttcgtactaggggatgatttattaatgtggtcaaatcgtaaggttgatttgaatttaatgtctcagtatgtagcgcaagagtttcaaatgcagcttcatggcgctgagaaatcagcgatctatcattatgatgagactattcatttccttggtcgagactggactaacggcatgccatcactggcagttgaagaggttgttaaacgaatggtatttccagagaagttccgaaaatactcaaaagatcgagctaaacgtgagagggaggttcgactattgttactgtcttatgcagccaactaccgatgtgcgtggaggattgcgtacttagccgttgatcctagtgacaggaacattcacaacgggtgtgcaaatgtggatgtcaatgcgtactgtcatgcatcgcctggggtaaatcccgaatttctctcaggcttaatgcgctacagactaaaatatggtctggaaaatcaggatgcgtatggtataccaagtactgcattacagtattggttgtag

SEQ ID NO: 1558 - DNA, 1310 bp, Lomandra cryptic virus 1
  source 1..1310: mol_type = other DNA
atgtaccgaccacattgctattagagcttgcaggatgggccagaagctattatcagcttgagcaacatgtcaaagccatactcgcgtatgacagagaaaagttgcctgaaccaactgacgtgtcttggaatcaaaccaagcaacacactgagtctaaattcagaagattcgaaaaggttcaatctctcagttatcaaaactttgatgctgtacattggatgcaatcttcagccgctggatatggttatgtcggccgaaagggtgacaacgaaaactataagcgtgctaagcgtactgccgtgacaattgctgaaaagctggatcacaacagaagctatggaccagaagctatagagaactcgactcctgacgttgcgtttacccgcactcaactatcacagttgaaagtcaagacgaaagttcggaacgtttggggcgaagcatttcattatgttttgctagagagtttattctctgagccgctagtggatttcttcaaagaggaggaatcattctattttatcggacaagatccgttgctagctgtccctgcgttggtagaggaaatattaagctcgaaggactatgtctatatgtttgactggtctcaattcgatgctacagttcaagaatgggagattagattcgcctttgattgtctggagaatatgctgacatttccgtctaacgtagaattccaaatatggcgtttcattattgagttgttcatatatcgaaagattgccggacctaatggcgtattgtacttgaagagtcagggcataccgtctggtagttgctttaccaacattgttggcagcatcacgaactatgttcgtatccaatatatgtttcagaggctaaccagccacttcgctacagtgttcacacacggcgacgacagcttagcaggcgtcgaaacaactcagtacgtgccgatgggcagatttgctgaaattggtgaaccacttgggtggattatcaacactgcaaaatcttccgtatcgcgaaagagagaaggagtctctttcctaagcagatcagttcgggagtcccaaaactaccgcgaagaactaacctgcctgcgcatgttattgtatccagaatacgaagtcaaatccggtgatatctctgcattgagggcaaagagtatcatggttgacgctggaccgcactcccagtacttatttgatatatttatttatctcaaagaaaagtacggaattgcacaggaactacctttcaatctgaaagtgtgggatcctttagagtatgaagcttgtaaaacttcagcttatgaactaatgtaa

SEQ ID NO: 1559 - DNA, 1539 bp, Macrophomina phaseolina partitivirus 1
  source 1..1539: mol_type = other DNA
atggcaacgtacctccccgccacttgggatttcgatcttcggtacatgacggaagtcaaacgactacctgattggagacgaggaattctcaggcagacgcagaactacgatccattcgtcgacgttgctctaaaatctttcgattccgaactacgcacggacatcaagggaatgacacgttctcctggtgatgactacgatctcgcgaatgctttgctccgctatgacaaagctcccatttcgctcaaattttcagatcgtcggttcatggccgcatactctcaggctgtatctgaggttatgtcggagttcaagctcttcaaccctgttgttccgcactggatacttgacgtagatctcgtgaaatcgacttcttccggataccctcatttcaaacgtaagggtgacattttcgaccaaatccgacaagaaggcagattccatctgcaccatctcaagctgtacgacctacaccgttgtcccctgctaccttgcagtccctccactcgtggtggtctgtctgaagtggacaatccaaaaacacggcttgtatggatgtaccccgccgcaatgaccgcttgtgaggcagttttcgcacaaccgctcatcgacgctctctactctgagaagcgcgatttgttcctcaccggtgttgactccaagttccgaattcaacgtttcctttctctcctcgatggagaagaaggccacttcggtgttggactcgacttcaaagcgttcgatactttcaggagtacacagttaatttatgatgcttttgcagttctcaagcaaaacatcaaatttggctattactacgataaagtcaccggtttacaacaaggaagatccggagtcgctgctcgtgccgagaaggcattcgacaacatcgtcgagtacttcattcacacgccgattgtcctaccaaatggacgtatcgtgacgaagcaccacggcgtaccttcaggctcgcacttcacgaatctaattgattcaattgtcaaccgtattcttctcaagacgttcggtttctacgaaaagataccaattcgcaacctcaggacgaacggagatgactcagctttcacagtcacggatacttatgtgacagacatcatccagaaagcgagcgttttcttcgacaacttctatcgcatgacagtttctgtcgacaaatcagttgtcgcgtctgcaccctctcagatgcatgtctcaggcacagtctggacgcatcaaagaccgacccggtctacaagggagtggtttatgttagctgcctattctgacacctacatcgctgaaccaatcgactcgtttcagcgccttttagggctaggcattgctggagcattcggagacgctagatactgcagcttcttcgattacttccaacgcggctacgactgccgccatggtcctaaccttctcaactggaaaaagttacggtggttagaacatgctttcaacatcacggacctgcccatggtctacaagcaaggcgccaagtctacgctgcgccttcgcctcctcgtcgcttag

SEQ ID NO: 1560 - DNA, 1629 bp, Macrophomina phaseolina partitivirus 2
  source 1..1629: mol_type = other DNA
atggacaaccaacttttagagaatgtagttgtcaccgaaacagacttagctcagagagggtttgaggatggacttctggatcccaccctgttttctgccccatcgcgtgaaacacgcagaaaacaatctcgagcagagtttatctctactgaaggtctctccgaggtagcgcgctgggctggttatcaacaataccaaccccccggcaacgtagatccttgggtttcagaggccatgaagcaatacgacagaagtaaatacgacgatctaaaaggttacacccgtagaggtgaggctctacctgggatgtataaatccttgaagaagtacgaaggtaccgtcgcccgcttcacggatttctccgagaggcagcggcaggctatggtccgagcaattggaaaagcacgctcggctttcaggacccctgaaaagatgcagccatatcgaccacaccaggttgggcagcacataaagaccgacacctcagccggttttaccttcccaggtcttagaaagaaggattgcatggaagagatctaccaagaagctcgctggctggcccatcgaatcaagagtggtggacgtcgtcgttttgacccgcggcgggtgaggtttgctccttgcctagctggttcacgtggacatctttccccgagagatgacgtgaagaccaggctggtctgggtttaccccgcagagatgctggttgttgaaggtttgttcgcaccgataatctataacggattggcgacattacccaacggaccgctcatgttagggaagagttcgcaacggttattttccgagtggcttgcgaattacaaagaaggtgagatactacatggactcgatttctcagcgttcgacactcatgtgcctccgtggttaatccacgttgcatttgacattttaaagcaaaatatcgactttgagtatgatggaaacgttccaaatactaagaaaggtcagattaagctgtcgaacctctggaatgccgtagtctggtatttcatcaacacaccaattctgatgcctgacggcaggatgttcagaaaacgccacggtgtgccatcgggatcgtacttcacacagttgattgacagtgtcgtttcttatattctcataagttacgtgtgcgatttacagggattagaaccccggaatctaaaagttctcggagacgacagccaattcaggagcccgttttcgttagaccttgacagggcgcagagcgattgcgatgcgtgcgcgatgaacctgtcggttgtgaaatgcgaacagacaaaagacccaactcagttcaagtcgctgggtttgagatacaagaattctcatggttatcgtgacgacgatgactggttcaagttcgcaatatatcctgagcaacctcctcctgacctgcggacatcgatgtcccggttagttggtttatggcttggcggggctatgttctccaaagcttttgtgagtttctttgaatactaccaaagctgctaccccgtgccatctagcggtcagttctcgaaagaacaacgcaggtggatggagatacaacgaggcggtcgcgctcccctcgggtggtcggtgaaaaccgatcttttctggcgcagtattttctacacactgtag

SEQ ID NO: 1561 - DNA, 1620 bp, Magnaporthe grisea partitivirus 1
  source 1..1620: mol_type = other DNA
atggaagatgattctctagatcctacctttcactacgtcctagctaaggggtctcatttaattgacgcactccacctccgacctgctaagtcggggtcaaccactagcgaagatgtacttccacccaactacgtcaactccaatctgagcgagatcgcgaagtatggtggctattcgacgtacatgtctaactctaacaccgatcctcatgttagggagacactaaaactattttctcgacagacctacgaggatatccgtggttacactcgtcgtccacaaggaactcctggcatgtacactgccttagctaagttcgctggtgagcgtaacacattcaatgacctctcatctagccagaaacgctcgatgcgaagagcaatcgctaaagcgaagaaggctttcaaacttccgtacaaacgtgaaccactagattggcacgaagtgggacagtttctgcgccgtgacacggcggcagggtccaccttcatgggagccaagaagggtgacgtgatggaagagatctatcatgaggccaggtggctgggccaccgaatgaaacaggatggaaaacggtctttcgatccaaccaagatgaggttccctccttgcttggcaggtcagcgtggcggaatgtcagagattgacgatccgaaaacgcgacttgtgtggatttaccccgctgagatgttggtagtcgaagggttctacgcccctttgatgtatcgcgactttatgaacgatccaaattcaccgatgctcaacgggaagagtgcgcagcggttgtacaccgagtggtgctgcaaactgagggaaggggaaacactatatgggatcgacttttcatctttcgacaccaaggtgccagcctggttgatcagggtggcattcgatattctgaggcagaatattgagtggtctacgtttcagggtaagcctgtgtcaaaacaagaccgtcaaaagtggagaaatgtgtgggatgccatggtgtggtattttatcaatacacccattcttatgccggacggacgtatgttccgaaaattccggggtgtgccttccggatcgtggtggactcagatgatcgattccgtcgtcaattttatcttgatcgattatcttgctgactgccaagaagtagagatccgaaacctgaaggttctgggcgatgatagcgcattccgctcaggcaaccagttcgacctggaagttgcgaagagggactgtgaaccaaccggaatggtgataaagccagagaagtgtgagagatcagaagatcccgctgattttaaactgctgggcaccaagtaccgggacgggcatgtataccgcgaagacgatgagtggttcaagctcgcactgtaccccgagggtagtgtattcaccctcgatatgtcgttcactcgactaattggcctgtggataggtggagcgatgtttagtcgcaagttctgtgcatacatggacttttaccagtcgagttatccttgtcctgaggaggggtggttctccaaagatcagaaaaggtggcttgaagtaatctactcaggcaaagcgcccagaggctggactaccaagaagagtctattctggcgttcaatcttctatgcttatggctag

SEQ ID NO: 1562 - DNA, 1620 bp, Magnaporthe oryzae partitivirus 1
  source 1..1620: mol_type = other DNA
atggagaagacttctcctgacctcccttttactaaagatgttcttacatcggctgactgggatgccgtccaccgctctctgagctacggcaatcctggtcttacaaaaatcccggcagataaatggtgctacaaatacaacgtggaacaaacacgcatgaacacggatccatttgttcgcaaagcaatgaagctatgggacgaaacagagtacaagcagctctatggctacactaagaaagccagtcttgagcacggccttaatggccttaataagtacggtcgtccgcagcgtcaaaaatctcacatgccgagcgaattcaagggatcttaccaccgtgcattgcaagaggccacacgtgtcttcaccccacacgagcctctccaccgcctatcagtaccagatgtctgggataatatgaatctcgactcagcagcagggttcacgttccctggcaaaaagaagagcgaggttgttgaagaagcctttgacaccgccagctatatggcgcattttatctcagcgggtaaacatatttacgtgcctccagcaaagctggctttgcgtggtcacctctcagaactcgaggagatcaagactcgaccagtttgggtctttcccttcgaagtgacaatactggaaggtaaatgggcaatcccatattaccgtttcctggaagaagaggtccccagcgtccattttggcgaaggggccatgcaacgcctggccaagatcctggattcagacatcgcttcacacgccgagtatgcggagctaaccatggactggagtggtttcgacacaggagtaccgaactggatgaccgacgacgcccttgatatattattcggcgcgttcgatgaaacggcagttcaacatcaagatgacctcgtggtcggcggagagtacatggcttacaaaaatgaagccgttaaggatttccttaaaacgtacttcaaaaagacaaaaatcctgctgcccgacggttctgtatataagaagaatcatggtatcccaagtggttcattcttcactcaggcaatcggctcaatcatcaactacatagccgtgcgcactcttgatttctattttggatggaatggtcgccgatttaaggttctgggcgacgacagctcctacctcatacctaacggattgggaaaagtcagtgtagatgctgtctctaaagccgcgtgggcggcctttggcttcactttaaagcgtgagaaactacgaatcgctaccaaacagcacgagcgaaagtttcttggctatcaagtctcggcctatcggtacgagcggccatctgacgattggttaaagatggccttatatcccgaaagagattgcgagttcctagagcaatccgcgtcgcgggttttcgcattctacctccttggtggatgcaacgacgccacctactgtgatttcttccacgattatctcaatcgctatccagtagtgtatggaagtgagctccctttgacgaaaggcctaaaacgtctcttcaagttcgttcttcggttaaacgttgaacgtttggtttttctggatctgcctaactttgatccgctgaaaggacccttcgccttgtctctcggcgataaaccctttgggtga

SEQ ID NO: 1563 - DNA, 1620 bp, Magnaporthe oryzae partitivirus 2
  source 1..1620: mol_type = other DNA
atggagaagacttctcctgacctcccttttactaaagatgttcttacatcggttgactgggatgcctttcaccgctctctgagctacggcaatcccggtcttacaaaaatcccggcagataaatggtgctacaaatacaacgtggaacaaacacgcatgaacacggatccatttgttcgcaaagcgatgaagctatgggacgaaacagagtacaagcagctctatggctacactaagaaagccagacttgagcacggccttaacggccttaagaagtacggtcgtccgcagcgtcaaaaatctcacatgccaagcgaattcaaggaatcttaccaccgtgcattgcaagaggcgaaacgtgtcttcaccccacacgagcctctccaccgcctatcagtaccagatgtctgtgataatatgaatctcgactcagccgcagggttcacgttccctggcaaaaggaagagcgaggttgtcgaagaagccttcgacaccgccagctatatggcgcattttatctcagcgggtaaacatatttacgtgcctccagcaaagctagctttgcgtggtcacctctcagaactcgaggagatcaagactcgaccagtttgggtctttcctttcgaagtgacaattttggaaggtaaatgggcaatcccatattaccgtttcctagaagaagaggtccccagcgtccattttggcgaaggggccatgcaacgcctggccaagatcctggtttcagacatcgcttcacactccgagtatgctgagctaaccatggactggagtggtttcgacacaggagtaccgaactggatgaccgacgacgcctttgatatattattcggcgcgttcgatgaaacggcagttcaacatcaagatgacctcgtggtcggcggagagtacatggcttacaaaaatgaagccgttaaggatttccttaaaacgtactttaaaaagacaaaaatcctgctgcccgacggttctgtatataagaagaatcatggtatcccaagtggttcattcttcacgcaggcaatcggctcaatcatcaactacatagccgtgcgcactcttgatttctattttggatggaatggtcgccgatttaaggttctgggcgacgacagctccttcctcatacctaacggattgggaaaagtcaatgtagatgctgtctctaaagccgcgtgggcggcctttggcttcactttaaagcgtgagaaactacgaatcgctaccaaacagcacgagcgaaagtttcttggctatcaagtctcggcctatcggtacgagcggccatctgacgattggttaaagatggccttatatcccgaaagagattgcgagttcctagagcaatccgcgtcgcgggttttcgcattctacctccttggtggttgcaacgacgccacctactgtgatttcttccacgattatctcaatcgctatccagtagtgtatggaagagagctccctttgacgaaaggcctaaaacgtctcttcaagttcgttcttcggttaaacgttgaacgtttggtttttccggatctgactaactttgatccgctgaaagtacccttcgccttgtctctcggcgataaaccctttgggtga

SEQ ID NO: 1564 - DNA, 1620 bp, Magnaporthe oryzae partitivirus 3
  source 1..1620: mol_type = other DNA
atggaagatgattctctagatcctacctttcactacgtcctagctaaggggtctcatttaattgacgcactccacctccggcctgcaaagccggggtcaaccactagcgaagatgtgcttcctccaaactacgtcaactccaatcttagcgagatcgcgaagtatggtggctattcgacgtacatgtctaactctaacacagatcctcatgttagagagacactaaaactcttttctcgtgagacctacgaggacatccgtggttacactcgacgaccgcaaggaactccgggcatgtacactgccttagctaagttcgccggtgagcgtaacacattcaacgacctctctccaagccagaagagctctatgcgacgtgcaatcgctaaagcgacaaaggctttcaaacttccgtacaaacgtgaaccactagattggcacgaagtgggacagtttctgcgccgtgacacggcagcagggtccaccttcatgggagccaagaagggcgacgtgatggaagagatataccatgaggctcggtggctgggccacagaatgaaacaggatggaaaacggtctttcgatccaaccaagatgaggttccctccttgcttggcaggtcagcrtggcggaatgtcagagattgacgatccgaaaacgcggcttgtgtggatctaccctgctgagatgttgktagtcgaagggttctacgctcctttgatgtatcgggactttatgaacgatccaaattcaccaatgcttaacgggaagagtgcgcagcggctgtacaccgagtggtgctgcaaactaagggaaggggaaacactatatggtatcgatttttcatctttcgacactaaggtgccggcctggttagtccgggtggcattcgatattctgaggcagaatattgagtggtctacgttccagggcaagcctgtttcgaacaaagaccgtcagaagtggagaaacgtgtgggatgccatggtgtggtatttcattaatacacccattcttatgccggacgggcggatgttccgcaagtaccggggtgttccctccggatcgtggtggacacagatgatcgattcagtcgtcaactttattttgattgattatctcgctgactgccaagaagtagagatccgaaacctgagggtgttgggcgatgatagcgcattccgctcaaacgaccagttcgatttggaagttgcgaagagggactgtgagccaaccggaatggtgataaaaccagaaaagtgtgagaggtcgagagatcccgccgacttcaaactgctgggcaccaagtaccgggacgggcatgtataccgcgaagacgatgagtggttcaagctcgcactgtaccccgagggtagtgtattcaccctcgacatgtcgttcactcgacttatcggcctgtggataggtggagcgatgtttagtcgcaagttctgtgcatacatggacttttaccaatcgagttatccttgtcctgaggaggggtggttctccaaagatcagaaaaggtggcttgaagtaatctactcaggcaaagcgccaagaggctggactaccaagaagagtctattctggcgttcaatcttctatgcctatggctag

SEQ ID NO: 1565 - DNA, 1446 bp, Marigold cryptic virus
  source 1..1446: mol_type = other DNA
atgtcagtctccacaatcaacatttcagggtatcaatttacttcttttagaggagatctagaagatttacaccagagacactctgaaaccatcggacgacagtccgaaactatctatgaagatgagtttgctaaagcagaactcatggacatagcaccgcagttgtatgatcaatggatccaaggttgggcaaggagttactactccggcactaaacacttagaggccatcatgcaatacgcgacaccaaacactcctatcacacggcttaaccaactagtttggcgacagagcgtcgaagctgtaagagatgggttacgtagcctttcaccagtgagggcgttttcagtagacacagaactgaaatcagtacaatatatccagtcatcatcggccggctacggttatataggtgcaaaaggtgagccagaaggcgagaaccatcgtagagcaattgctcgagcgaaggcaactctatattctgccatccgcacagatggacagggtattgagcacgcaataaaggagtcagttcctgacgttggctacacgcgcacccagctagcgaatatcgcagaaacgactaaggttagaggcgtatggggaagagcattccactatatattacttgaaggaaccatagcaaaaccattgcttgattcgttcatgacttctgacacttttgtcatgataggacgcgatcctacgactagcgtaccaagattactttccagtattaaaacaggagatggatggatttcatcaatcgactggagtcaatttgactctacagttagcagattcgagatagaagctgctttctcattacttaaggagaaggtatattttccagacttagaaacagaaatgtgtttcgaattctgtaaactcttgtttatacacaagaagattgccgctccagacggaaagatttattggtcacacaaaggaataccatccggtagttatttcactacgcttattggatcaatcgttaacagattaaggattgaatatctatggcggatcaaatataatgaaggaccagaatcttgttatgtattaggcgacgattccctaatatactatgacaggtattatgatccatcagagatcgctagagaagcttcaaatcttaactggtatatgaatccagataagacggaatgttcaaccattccatcaggaataactttcctcggacgtaccgttaaaggagggatgaaccaacgtgatcttaaacgatgtttaaggttactcatcttacctgagtaccccgttgaagacggaagtatttctgcatatcgagcagaatcaatcgctgaagatgcgggaggcaccggcgggattttgaacgacattgcgaagaggcttaaaaggatttatggagttgcttctgaagaagaagttcccattagacttaggaggtataatttcaatttataa

SEQ ID NO: 1566 - DNA, 1434 bp, Melon partitivirus; identical to SEQ ID NO: 628
  source 1..1434: mol_type = other DNA

SEQ ID NO: 1567 - DNA, 1722 bp, Metarhizium brunneum partitivirus 1
  source 1..1722: mol_type = other DNA
atgggtttaaaatacctccgtcgtgtgtctcgcttcccttctagggctagccagcacatggatgagtatgcgactcgggctctcaacaacgtggcttcggccgacgttcgcgagttcatcgcgcaaaccgcaaaggcatggcacaggccctccggggacgtgtcccttgttgaggatagcctactaaagtacgacacgcgtccctcgaaaaggtgtacaactggcgattacttggctatacttaagaagaccttagacgaactgcgacctgacgaacctatcatcccacttactctcggcgcagctgccaaacatcccgacttcccgcgaactacatcgcctggatttccgtggattcatcaaggcttcagctctaaatctgacgtcttgcaagacaaaggtggctccggtctcattcaccgcgcttgggactcaatcggacgtggtattccatggtcactcccagactcactcgcctatcacagagttgtcgcttcaccagtcgacaaaactaaggttaggccagtttggggctatcccgttgacgtcgttctagaagaagctcgtttcttcttgccgatgatcacgtttttaaagggaaagtgcaataaagacgacactttttatggtttaggtttggaaacggccctctccggtcattcccacctgcttcgctgtttcagcgaaaatcacattaagctgtcaatgtctgctgacctgtcaaattttgatgcccaagttccgtcgtggatcatccgtgacgtgttttcacacatgtcgtcatggtttgatttcaccaaggtccaggatagtgaagggaaaatttggaacgtcaaagacgaacagacctgccgcagatggcgagcaatggtttcgtactttgtaaacaccaagattcgcacccccagtggtttgcgagttcagaagtcatcaggcgtaccgtctggttctatgtttacaaatgtcatcgacactcttgttaacgccgttcaaatgcgcaccgcgatacgtcgcgtaacaggttatctccccgccaaggattactactacggcgacgacagtgaagtcttcttcgactgtcaagggattgatctcgatgcgttagcatctgagctgttggacactttcggcgccatcctttctgtcgagaaaacaatacttaccgacaacccagacaatattcactggttggggtactattgtagggaaggctctccacgccgccctctcgacttcatcatagcttccacgctttacccagagcgagaagttgtttcccctctcgactcatgtgctcgtatggtcggacagatgtactctgtcatggaccccaagtcctccgtcctcttctacgacgccgtgcgtcacctccttctcgagtatcacatcgacgacgccactctcgagacctaccttcgtactttgccttccaaggctttcaagtacttagcgactctaggtctagatatgtctgaaatcagtttaccgatctgtcacccagatccgtttggttcacgatatattcccgctgtgttacctcgaccctcgcctcgcaattacacgaaaatcagagatagagtgcttcctgattacgctttcgttgcagaggcttacgctaaccgttctctacgctcacgttcttttaccgactttgataaatatattgaaacgttcagcttttacaatgagttcgagttagacgaagcttacttctcggcctag

SEQ ID NO: 1568 - DNA, 1617 bp, Metarhizium majus partitivirus 1
  source 1..1617: mol_type = other DNA
atgatggagtctttcgactccccgcccggccctagtcaggcccgggccccctcggttaactgggaacagtttcatgcttccatcaaaggaagccccggtcttaggcaacttaagcctaacaaatggaactacaaatacaacgtcgaacaaacaagaatgaacaccgatcctttcgtccgtaaatctatgaaatactggaacccaaacaagtatgaagagctttacggcaaaacgaaacgtgctgagctcattcaaggtttggagtctttcaaaaacttctctcgttggcagcgtcacaagccaacttctcccgaattcaagtctgcgtactcaagggctttgaatgcaactcgcagagtttttactccacatgaacccctacacagatactccgtcccggatgtctgtgacaagatgaaccttgactcagccgccggttattccttccccatgaaaaagaaaagtgaatgtattgaagaactttatgatacagcaagttatttagcacatttcatttcccatgggaaagacgtttttattcctccttgcaaacttgctttaagaggccacctttctgacattgatgaagggaagactagatcagtctgggtttacccaggtgaactatctattctcgaaggcaagtgggcgttgccatactataaatttctcgaggaggaggtaccttccgtccatttcggtgaaggtgccatgcaacgcctggccaagatgctagttggtggactagctacgcatgatgaatgcgtcgaagtaactcttgactggagcagctttgattccaccgtccccaactggatgatcgatgatgcctttgacatccttttcgattcctttgatgaacaatatacgttacatcaaggcgatcttgttttcggtggtcaacacatggaagacaagaatgttgcagtccgtgaattcttgaagacttactttaagaagacgaaaatcatgctgccagatggtaccgtctatgctaaacaacacggtattccaagtggttccttcttcactcaggccattggatccatcgttaactacatcgccattcgaactatcgacttccactctggttggaacgcccgccgttttcgtgtactcggcgatgattcttcgttccttataccatacggcaaatccagaatcacagcagatgccgttgctgattacgcctggttcaattttggcatggttctgaaacgggaaaaactgcgtatagcagaaaaacaacatgaacgcaaattcttaggttatcaagtttcggcttaccgttatgagagaccctctgaagactggctgtccatggtgctatacccagagcgagacgtagagttcttagaacaatccgcctcacgcgtcttcgcttattatttactaggcggatgtaacgacgaaatttattgtagttttttccgtgactacatacgccgttacccaattttatatggtaggcaacttcccctaacccacggtctcaaacgattgtttagattcgtgctgaggttgcccctcgatatgcttcagtttccggacttctcgaagctaaatactttaaaagtccccttcgctctctcttgtggagatcgaccgtttgattga

SEQ ID NO: 1569 - DNA, 1863 bp, Mischke partiti-like virus
  source 1..1863: mol_type = other DNA
atgaaacgatccaactatgtgatcgaagagatcataagagtcatgaatgagattgactcaagagcacagaatctgaagaagcctcagcatgtagaggacttagcccgagggttcgaagtttctcagaaagcgatgagccaggaggagatagtccaaatgactccgcttatgaagaacgcactcgaaatctttggcgacaagccagtaggtgacgagaactggaagctcacagttaatatgcccttaacgaaggcagagaagtggttcgatgaagctatcaggatacttcttactaagttcaatggtccagaaagacagtataacgacaatttggatttgctggacaaggaccactatgatgttcaatgttggtccaacagacacgagaactttcgacaaattcaacctgggcaagcagaagagcgattggaggcaacgagagagtacactagggcaacaaaacgtattgggcttatccaaaaactcaggagtgatcctgttttacaaaaggcagttttgttggtattcaatcaactccccgaggttaaagctagtaaccaattcctagagataaacttaccttttatgactaagcactcaaatgtaggatacaagtggtgggcgaatgataggaatctcgtcgagggtacaaacgaaacctatgctcagatgacactgaagctaagtgaaaagttgagtgagaaagatctcgataattggaatatctcaactggctacggccggaatcagcgtaagggtcgattaatcattgcggtgtcgcgcgttttgaatttgtggttaaatcgactagaagccgttgaaattgctgcttataaaaggaagagcagcctattccttggatacaacgatgacgttgcccttaaggaaggcctcacgagaatggttaattatgcgaaacaacacggtttaaaaatgcgcaataatgaccagtctcggttcgacaggcacgtgtcttatgagtggttgttactgatgaatgctatatcggtaatcaaagctcaaggatctctgtccaagcagattgctatgaagagagcagtcttgtcgactaaaacgtggtttgtgaacggcttgacgggaaaactagaggagttctatggcaggatattctctggcttcatcgatactaatcgcggtggcggaataattaatgcattggtaaccacgtactgcgttatgaagcaggatcccaaatatgctgaacatgtctacaatgcggactactacatgctggtaatgggagatgacaataacttcctataccaaaaccttgaccacaaacagtttgaaaaggatatggaaagtcttgggttcaaagttaatatggacaaagatgagtacggcccgatgtttttacaatatagactctttcaggaccatgatacgcttgtcatggcatacgcatgggttcgtgttgtttactcaatgcttatgaaggaagagggtaagggactgggacctgccgggtggtatatagcgtggttgcagcaaatgtcaaaatgtatcgagtttcaaccggcgttcaaaatccttgtaaatcttctcattccgtttgatgataatcatttcttcacggataaatctatcaaagagatagtcgctatgatgaatgaagaagatcgagctaaagaggcagaggcaaagaccggcgctcaaaaacgtaggtatcaatctactttggataagcttagagatggagatccgttaaaatcgagattagtcgagtccatcgagaaagggggtgaaggttacctcgccgatcttcacgaagcagtgaagaaggccgtcgatccgaatttcctcaaagatgctgggctgaaagtgccagctcgcaagcgttaa

SEQ ID NO: 1570 - DNA, 1815 bp, Monilinia partitivirus A
  source 1..1815: mol_type = other DNA
atgaatttaaactacattaaaaccttacttgggaaccactctcttacgagagataaaggtgatttatcaagcctcgctgaatggcgacttgactatgtctacagatccgctctcaaattcttctctaaagaagaagttgatcaagctgcttcgaaccgacgttcgaatacatctgacgacgctgttatcgatgacttcatgtctttcgaacagccagttcaccccattcctagagatgataattatctattggctttacaagtcgtgaaagatacctttcaccctggaaaactgctttacccagtttctttccctgatcttagatactatccctggaatattaaaccgaatgccgaagcgccttggaataccgagaccttcaaattcaaaccaacattcagaaatcttgacgatgaatctgaatcccccaagctacgtgaacatattgaaaagctgtctttctggatatctgacaaacacatacgtgttgtagactacttacgtctaaaacaacgatttggtatcacaaacagttcttttcactcatttcacaacctgtacaacgagatcttttcatacaaccgatccctcgtccactttataaaagatggactgacccctttctggcaaaatggaattccaatcccctattattggagtaccttacacgctagagctcatgttgttgcaagcgatgaacccgataaaattcgtgccgtttttggagccccaaagcttcttctaatggtagaaaacatgtttatctggcctcttcaagctacatacttaaacaacgatgacaaaggacgtctcctctggggccgcgaaacgatcaaaggtggatggaagaaactatacaatgaaatcaactcaaagattttaccgaacacagtcttatcattagattggtcacaattcgacaagcgattgctttttgaactgattgacgacgttcacataatctggagatcatacttcgatttcaacatgtatcaacccacttctttctatcccactgccagtactactctcgaacgcatcgaacgtctttggacttggatgtgccactccattaaatacactcctatccttctacctgatggtagactttacaattggacacggaatggatttggatctggatatcaacagacccaactaatggactcatttgctaatgcgatcatgatactaacatgtctcaaagcgatgggaatcaacatcgaaagtaaacacttctggattagagtacaaggtgacgactccctcattgcatttcaagagatgactgttcaaatttttggaccttcagctctcacttcacttgcttctgctgctaaatactattttaacgcaatacttagtgaaaagaaatcgcaaatatctgattcgactgaaaatatatcagtcctgagtttctttaactcatatggattgccatatcgaaaagatgaggacctactacgtcacttgatgttccctgagacacctggaaccaaagatcagcttcttgctgcatcaattggtctagcttactccgcgtgcggatgctcacctagatttcacaatctatgtgattacatcgtaacccggcttatgtctgaggatagaacacccgacctcaatgcactaaattggatgatccgagctggaatcttcgaacctgaagaaactgctgccatgcttcaatcaccactccctagctgtattgacctacgagcatcggtctggagccacactcctagatcgtatctcagtaaagaacgactttggcccactgaacctggaactagaggaagatttttcttcctgtaa

SEQ ID NO: 1571 - DNA, 1428 bp, Morus alba cryptic virus
  source 1..1428: mol_type = other DNA
atgttaaacaacactggatatgagtttacggacttcgtgcaagatctcgaagagaccggtaaacggcatacccacgtagtgaggagagatcccgaggttacctacgaagatccctacgcaagcagggaactaagatccagataccctcgattgtatgagaacgtcatccacggatggtccagaagctactacagtggcgctgaacacatgaaggcgatcctacaatacgctacaccaaacacaacttatgaacgcgtgaaccaaccagcttacgagcaggcaaaggctaacgtgttagaaagtttacgtagccttccaactgtgagggcattcaatgtgaaagacgagttagacctcgtttcattcgaatcgtcttcagcggcgggttacgactatataggcgtgaaaggtcctcaagatggcgaaaaccacgatagggcaatcaaacgtgcgaaagcaacgctatggtcagcaatcatcccaggtgatgaaggcattgaacatgtgttgaggacttatgtcccggacgttggttacacacgcacacagctaactgatctgcgagagaagatgaaagttagaggcgtatggggaagagcattccattacatccttttagagggtgtcatagcccaaccattactagaagcattcaagcgttctagaacattctttcacatagggagcgacccaacagttagcgtcccattcatattatccgatacggccagcaaatcactatggttaacagctattgactggaaagcatttgacgcaaccgtgagtagattcgaaattaatgcagcttttgatctcataaaatcaattgtgcaatttccgaaccaggagacagaacaaactctagaactctgtcgacaactattcactcataagatgctcgctgcacccgacggcaacatatactggatacacaaaggtattccctcaggtagttattttacttctactgtcggatcaatcatcaatagactcagaattgagtacatgtggttactacatttcggaagaagtccgaaggtgtgctacactcaaggagacgactcattgattggtgacgaccaattattcagtcccatggacatggcatatatcgctgaaccattgaattggattatcaatccaacgaagacggtgacatcgaagatgctcgaaatggtgacattcctaggaagaacaagcttaggtggtttaaatcaaagagatttaaagcgctgtttacgcttactcatcctacctgaatatcctgttacgacaggagcaatatctgcgttcagagcgagatcaatagcatatgactcagacacaacgagtcagatactagacgaactagcccgcgctctccggaagaaatatggaatcgcaagagaagaagaggttccgagacaactcagaccttggaaagcttaa

SEQ ID NO: 1572 - DNA, 1405 bp, Mycosphaerella partitivirus A
  source 1..1405: mol_type = other DNA
atggcgctcaggttcctcaagaaggtaccaaaattttccaaaattaacgccatgcacgtagacacttttgctcgttcttctttgttgcaagtggcctctccgtcaggtcgcaagaagattcttcaggttgaaaaggaatggcatcgtcctcagggagatgaccgcgtgcttgatgataacctaatggaatacggaaagcgattgccttcccgatgtctatctggtgattatctggccatccttcgagaaaccatggaggaacttcgtcccaatgagcttgtcgttccgacgacactcggggcagcagaaaagaatcctcaattgcccaaaaccacttctcctggatttccttggattcacaagggctacaagacgaaacaggacgtcctagacgaccagtttgccgttggtagcattcatggagcttggagggctataggagatgggaagtcttggtctttacccgactcaatggcttttcaccgcgtcgttgcttcaacaaaagaccgatccaagattcgacccgtttggggttatccgatcgatgtccttttggaggaagcccgcttcttctatccacttttcgatgagcttaaggttgtatccaatgaaagagataccttttatggtattggtttggagactggtctttctggtcaccgccacctttgtcgacacatgctttccgcaggtgttaaattggctctttgttcggatataagttctttcgatgcacacgtacctgcgtggttgatccgcgacgtgttctcgcacatgtcgtcctggttcgactttcatcatgtacgtgatagtgaggggaagatctggcctgtcgatgcagctaagactgctcgtcgctggcgcgcaatggtttcgtattttattaatacgaaaatcagaacaccttcgggactccggttccaaaagtttcagggcgtaccatctggttcgtgtttcacaaacctaatggataccctttgcaatgccgtgatgatgcgtgtcgctcttcgacgtgtcactggtaatttgccagtcaaggattactacatgggtgacgactcagccgtcttcatcaattgtagcatatctcttccagatctggcaaccgagctcgatactacgttcggttccgaattgagtttgaggaaaaccatccttaccgacaatactgacaatatccattggcttgggtattatcatcgtgaaacgggtccacagcgcgacctagatttcatcattgcttcgactctctttcccgaacgtgaggtggaaggtcctttggacgccaccgctcgacttctcggtcagatgtattctacaatgcatccgatttggtctgtcacgttcttcgacgcagttcagcatctcaggaagctgtactccatcagtgagcaggatattattg

SEQ ID NO: 1573 - DNA, 2268 bp, Neurospora crassa partitivirus 1
  source 1..2268: mol_type = other DNA
atgcattccctgttcactatcgtcaacttctacatcctcctccgcttccaacagcgcagacgacgaaaagaaacaacccccaatctcatctttccaatcagaaacattctattcgaatgggaacaccgccgctccatcccccgcgacccctccgtccccttcagatatttcgattattcaaagtccctcctctcatacattgacctcatgatctgtcacaagatcaagattcacatcgatgacaacattcaggcaattgaaacccgctacgaacttcgtaacgaaccctttgacctatactactatgtccccgatgaagaccttccccccgagcgtcaacccgccagtggcatccgctacacaggccgccgttatcacgagattccctctggaacactcaacattaacgaaactgagcacatcatctccgatgatcccgactttatcgaaacccccgaattccgatctggtatcctatacgatgaaacgatcgacctctccggcgctccccccgtcccagaaatcgtccaaatcattcatgactggttcccccattatgaacaatacattaacgtattctgccgcccgccttccttcggccctcaagccttccgagacttcaatcgtccaacccccaaccctccccgcccaacccccgaacgtcatgaagctattatgaacgttgtacgcgcaaaattcaacatcaagccctacagacccctccactttgtagacgccattgccgccgaaacgcctctgaatacctcagcttcatattactccaagtttgacccccaaactagagtcctcgcccgctacagtgcccccacacgctatcgtgacatgcctacctccaaaggctacaactttaacgttacaatgaacctctttcggaccgaataccatcatattaaatatgattgctttcccttcccgactgacaaccatgacccagaagccaatgcttcaatcctcgatacatggttcgccaagcacccctcccagctgttcattcgcactcaaatctctaagcgtgaccctaacgaccctaagaaaattaggcccgtttactccgttgatgacagatttctccacattgagaaaaccctcgtcacccccgccctcgcccagcttcgcaacccccaatgctgcgtcgcacatggtttagaaacattccgtggtgcaatgtgtctcctcgaccgcactgctctgttttatgaatcattcatatccctcgactggtctcaatttgaccaacgacttccctcttacgcgatcaccgctttcttcctcgattacattccctccctccttattgtatcacacggttacttcccctcccgtggctacgaatccactcagcaagatatacattcttttgcaagtaaaatctacaacattgtagttttcctcacaacgtggtacctcaatatgtcgtacctctcctatgacggttttgcttatatccgcgatcatggtggtgtaccttccggtctattgaacactcagttcctagattccttcggaaatatgtacatcattgtagattgtctacttgagttcggatttacacaggctgaatgtctcgacatgctctactgcgtcctaggtgatgataacctcatcttccttagacaaagattccagcgtgtagtcgaatttatgtccttcctctccagctacgctgaacagcgacatggtatggtagtctccatactaaagtctgtttacaccagcctaaggactaagattacattcttgagctatgagaacaattatggtatgcccatccgcccgattggcaaactagtcgcacaactgacaatgcccgaacgccccattccccatggccgccaatggatccattccgcacgtgcactcggtttagcctacgcaaactgtggtcaagatgtaaattttcatcttctctgcaaaatggtatacgataaattccgccccgacgtcccagtgtcttcacttcacgttgccaaagtctttaagaaatggaaatatcaactcccagagttcgatattgagtccgtaacttacacatttcctgactttccaactttgtttgaaattcgccagctagtctctgactatcacggctttttttccgaaaccgataaatggaatttcaacctattcgaagcacccccaagtgacaaccttcacgagtacgtaactctgaaagaatatgttcagaccaacgaacacatgtcttccaccatacgcgcttttatgcaaggtaagagatcctttttgtga

SEQ ID NO: 1574 - DNA, 2268 bp, Neurospora discreta partitivirus 1
  source 1..2268: mol_type = other DNA
atgcattccctgtttactatcgtcaacttctacatcctcctccgcttccaacagcgcagacgacgaaaagaaacaacctctcatctcatcttcccgatcagaaacattctattcgaatgggaacaccgtcgctccatcccccgcgacctctccgtccccttcagatatttcgactattcaaagtcgctcctctcatacattgacctcatgatctgtcacaagatcaagattcacatcgatgacaacacccaggcaattgaaacccgttacgaactccgcaacgaaccttttgacctctattactatgtccccgatgaggacctcccccccgaacgtcaacccgccagtggcatccgctacacaggccgccgatatcacgagattccctcaggaacactcaatattaacgaaaccgagcacatcatctctgatgatcctgactttatcgaaactcccgaattccgatccggtatcttacacgatgaaacgatcgacctctccggcgcccctcccgtcccagaaatcgtccaaatcattcatgactggttcccccattatgaacaatacattaacgtattctgccgcccgccctcctttggcccccaagccttccgagacttcaatcgtccaacccccaacccccctcccccaacccccgaacgtcatgaagctattatgaccgttatacgcgcaaaattcaacatcaagccctacaggcctctccacttcgtagacgctattgccgccgaaacgcccttaaacacctcagcttcatattactccaagtttgacccacaaactagagtcctcgcccattacagtgcccccacacgttaccgtgatatgcccacctccaaaggctataactttaacgtcactatgaacctctttcgcacggaataccatcatatcaaatatgattgctttcccttcccgactgacaaccatgacctagaagctaacacttcaatcctcgatacatggttcgccaaacatccctcccagctgttcatacgcactcaaatctccaagcgtgatcccaacgatcctaagaaaattaggcccgtttactccgttgatgacagatttctccatatagagaaaacactcgtcacgcccgccctcgcccaacttcgcaatccccaatgttgcgtcgcacatggtttagaaacattccgtggtgctatgtgtctcctcgaccgtaccgctttgttctatgaatcattcatatccctcgactggtctcaattcgaccaacgacttcctccctacgcgatcaccgctttcttcctcgattacattccctccctcctcattgtatcacacggctacttcccctcccgtggttacgaatccactcagcaagatatacacctttttgcaagtaaaatctacaatatcgtagttttcctcacaacatggtacttcaatatgtcgtacctttcctttgacggttttgcctatatccgcgatcatggtggtgtaccttccggtctactgaacactcagttcctagactctttcggaaacatgtacatcattacagattgtctacttgagttcggatttacacaggccgaatgtctcgacatgctctactgcgtcctaggtgatgataacctcatcttccttagacaaagattccagcgtgtaatccaatttatgtccttcctctccagctacgctgaacagcgacatggtatggtagtctccatactaaagtccgtctatactagcctaaggaccaagattacattcttgagctacgagaacaattatggtatgcccatccgcccgattggcaaactagtcgcacaactgacaatgcccgaacgccccatcccccatggccgccaatggatccattccgcacgtgcactcggtttagcctacgcaaactgtggtcaagatgcaaattttcatcttctctgcaaaatggtatacgataaattccgccccgacgtcccagtgtcttcacttcatgttgccaaagtttttaagaaatggaaatatcaactccccgaatttgatattgagtccgttacctacacatttcccgactttccaaccctgtttgaaatccgccagctagtctccaactatcacggcttcctctccgaaaccgacaaatggaatttcaacctattcgaagcacctccaagtgacaaccttcacgagtacgtaactctgaaagaatatgttcagaccaacgaatacatgtcttccaccatacgcgcttttatgcaaggtaagagatcctttttgtga

SEQ ID NO: 1575 - DNA, 2265 bp, Neurospora discreta partitivirus 2
  source 1..2265: mol_type = other DNA
atgctcgcaatttcaactatcgtcacgctaaacgtactcctacgtttccaacaacgccgcagacgaaaagaaactgcccccaacctgacgtttccaatcagaaacattctttacgaatgggaaacccgccgatcaataccacgatctactgagccctttccgatcttcgactactcgaaatcgctcctcgcttacatcgatttgattacatgccacaagattaagatccatctcaacgatgagtccaacgtcatccgtgacagatatcaagccagagaagagcccttcgacgtctacgccgacatcgacctaactgatataccagaagaacgctattcagctcctggaatcactaccgctccccgccgttatcaccagatcccatccggatcacttaatattaacgaacagatccacgttatccaatctgactccgacttcactgaagacagagaccacagatccaacacactatttgatgaatccatcgatttatccggcaatccccctcaccccgtaattgaacaactcattcacgattggttccctcaatacattcgctaccttgacgattactgccgtcctccttccttcggaccccaagcattcatcgacttcaatcgcgaaaccccctcaccccccccccctagccccgagcgccatgaagcaatcatgagaatcgttcgttccaaaatgaacatcaagccctacagacccctgcactttgcagatgcactagccgctgaaacccctctcaacacctccgcttcgtactactcaaaatacgaccctcgtatgcgagtcctcgcccgctattcctcgccacaacgttatcgtgacatgcccacctctaaaggacatttcatcaacgttactctcaacgagttccgcctcgaatttcatcatataaaatacgatggagtccccttccctcacaaccacgactcccttgatgaactcaatcaacgcaatgaattatggatgtccaaacatcccactcaactattcatcagaactcaaatatcaaagcgcgaccccactgagcccaagaaaatccgccccgtctacgccgtagatgaccgctttcttcacatcgaaaagacactaaccgtcccccttctcgcccagcttcgcaacccgcaatgctgtgtcgcccacggattagaaacctttcgcggtgcaatgactctactcgacaacatagctctctactttgacagctacgtatcactcgactggtcacaatacgatcaacgtctcccctactacgttatcgtcgctttcttcctcgacttcctggcatccctaataatcgtgtcccacggttacatgcccactcgctcctaccctgatactactactcaggaattccactccttcgcaagaagacaattcaacgtactaaaataccttctagtatggtatgaacgtatgaccttcctctcatttgacggatttgcctacgttcgtgaacatggtggtgtaccatctggactactgaacacgcagtcccttgattccttcgggaatatgtacatcatttcagattgtctcctcgaattcggattcaccgagccagagtgtacagacatgcttttctgcgtactcggagatgataacctcattttcctacgccacaacctaagcagagtctctgaattcatgattttcctcgatcactacgcaaaagatcgacacggaatggtcctatccattctaaaatccatgtattctaacttaagatccaagatcacctttcttggctatgagaacaactatggctaccccacccgtcctatcggtaaactcgtcgcacagctcgccttcccagagcgtcctgtacctgacaaccgacagtggatccacgccgccagagccctaggcctagcctacgcctcctgtggacaagatcctgtatttcacttgctttgcaagatggtttacgacaaattccgaccttcgacctcggtcccgtctctccacatccagaagatatttaagaaatggaagtaccaacttcctgacttcgatattgaagatgtagaatatacgtttcctgactttcccacgtctaatgctatcaaacacattgtttatggctaccacggaacattttccgaaacagacaaatggaacttcaacgtattcgacgtcccacctagtgacaacctccaagattacatagtactcaaggactacgttctacaacatccagaactggcccaacagactaacgaatattggcacggtaagagatccctttga

SEQ ID NO: 1576 - DNA, 2238 bp, Neurospora discreta partitivirus 3
  source 1..2238: mol_type = other DNA
atgaagctccacgtccctttcacttccgtccgcgactatctcgccgaacgtatgatccgaatcaaacgagaatggcaactttaccagaaacacgatcacgcccccgatgcaatcgttgaagaaattcaagactctgacacccgaagaatgtacgcaaacgcctacgtcccccgtgaaaagaaagaactcttcaagatctacgaatcagaatatcaacaaatcgttgaatcactccgaatcgattatcaagcacgagaacaacccttcgaactccgaagaccacgatccccatctgtctctattcctgagaaccgcctccctcaacctggtttaaaactcatacctcacgagtaccactccggccacatcatccacgagaatccgacgacctcccgtcctctcaactcagatgaagaaactgacgctccgaaatcctaccttaccggtgatattgactttggtcctgacattgatccacttctacgatctctaatcgtccaaaagtatccacaatacctgccgtatatcaacaagttctgccgccccgctggaacaactaacggtacctttcgcgacttcaacaaagaacaagtccccactgctcccatcgaccctgaccgaaaagaacacgttttaaaacacgtcctccacttcttagacgccacaccttatcttccactccactttgtagatacgcaattcgataaacgcccgctcatcacaggaactggttaccacaaccgcttctcctacgccgcccgcgctcactcccgattttcgcatcctccagattacgccgacaaacctacgtcccgtggctatttttacaacgctacctacgaaaacgctcgcacgctaatccataaaatcaaagaaaccggcatgcccttcaacctcgcattcgccccagaagacgatgacctaacagacgatcaaattattgattatgtcctccactgtgagaacttcttccttgactaccccactctgctattcacacgcaatcacatctctgaccgagagaaatctctcaaagtccgtcctgtttatgccgtcgatgaccttttcctcctcatcgaatctatgctaacgttccccctccttgtgcaagctcgaaagccttcctgctctatcatgtatggtctcgaaaccattcgtggctccaactgctacctcgataagctagctctctcttacgagactttcttcacaattgattggtccagttttgatcaacgcgtcccccgctccttgaccgacctgtactatactgacttcctccgacgtctaatcgttatcaatcatggctacgctccaacgtatgaatatcctacgtatcccgaccttactgaacattccatgtacaagaaaatggacaaccttctccatttcctgcacttatggtacaataacatggccttcctatctattgatggttatgcttactggcgactctacgctggtgtaccttctggtctattcaatacccagtatctcgattccttcgtaaatctttatatccttaccgatgctctcatcgaatttggattcacagatgaagaaatccgtgacctcgtactctttgtactaggtgatgataattctggattcactcacatccctttcgaaagattgacttcctttgtctcttttctcgaaaagtatgctctacgtcgatacaacatggtcctttccaagaccaaatccgtcctcaccactcttcgctcgaaaatcgaatccctcggttatcagtgcaactttggccgaccaaaacgcgatatcgcaaaactagtcgctcaactgtgttaccccgaacaccgaatgaactacaagactatgtccgcccgcgccattggtattgcctacgcctcatgtggtaatgaccctacctttcactctttttgctatgatgtattctgcatgttcctccccttctacgaacacgatgcacgatctgacttgcaactagcccggaaactacaactgactgaccccgaccagctcaactttgaaacaaagcaccttcaattcccaacaattgacatgatccgaaaatgcttcgatcattatcaaggtccacttcaatatgctccaaaatggaattacgcccattttatcaacggtccagatgtcgttcccccctccgcaaagacgatgcacgactacgaaattgaacacaatctcgaagctcgacaagcaccgactttccgacaggctgatcttttgcctttggtttaa

SEQ ID NO: 1577 - DNA, 2106 bp, Neurospora discreta partitivirus 4
  source 1..2106: mol_type = other DNA
atgcttaatcagatacgcgactacttccacgaacgtctctcccgactcctttgggatcataagatctttcaaaagaactccggcaatcctgagataaccctcgaccgtcaccaagactctgatatcgaacgcatctacaaatcatttcattatgacttctccaactctgacaaaaacactgattatgaagcacagtatcaagctattaaccatatccttgaaacaaaacaagctaaccaaggcttcgcttccgaattttaccgttttagagacactcctgtccctgacaacagaattccaccatcaggaattgatctactcccttatgagtataaatcgattaacatcgtcactgctactcctgaagttccagaaactggtttccagatccaccctcgaattgaacgtctcgtacgctcccgttaccctcagtatcttacctatgttcgtaaattcgtacgtccactcggaactactgacgctaccgtcaccgatttctttaagccccagactccctccaaacccgttgaacccgaacgcttgcaacgcattctttctcatattatgaagaaaatggcagccactccctaccttcccctccactttgtcgacacccaatacgacaaacggccgctttcatctggcactggttactaccaccgccgatcccatgctgcaaacattcatgcaatgttttctcacccaagagaatatgaaaacagacctacttctaaaggttatttcatcaatgcatttctcgaatctgctcgctcattagtccattggatcaaacaaacttccgtcccttttcggaaccttcccaacgacttacctcacgcattacgcacattcttccttcaacgacctactatgttatttactcgcaatcacatttctgatcgcactggcacactcaagcaacgtcccgtttatgctgtagatgatctcttcttaacgatcgaatctatgctaactttccctgctcacgtaattgcccgcaaacctgaatgttgtattatgtatggacttgaaactattagaggcgcaaaccgtgctctcgacagaatagctcaatcttattcatcatactttacaattgactggtccggctttgatcaacgtgcaccctggtgtataatccgaacatttttctcggaatatcttccccgccttattgtaattaaccatggctatgcccccacttacgagtacccctcgtatcctgacctcacatccgacaagatggctcaaagagtcatcaatttgctatcgttcctcgcaacgtggtacttcaatatggtattcacgactgctgatggctatgcatatgtccgccgccacgcaggtgtcccttctggactcctcaacacacagtatctcgattcgtatgttaatttattctccatcattgatggattaattgaattcaactgcaccgatgatgaaatagacgaaattcttctatttatcatgggcgatgataactctggcttcaccttatggtcaatctctcgacttgaatccttcattggatttttcgaacattacgctctcaaccgttatggtatggtactttccaaaacaaagtccgtcataacaacacttagacacaagattcaaaccttgtcctacgagtgcaattttggcatgcctacccgccccatcggcaagctcgtcgcacagctctgttacccagagcgtggtccacgacccaaatacatgtctgctcgcgcagtcggcatggcttgggcttcttgtggtcaagacaagacatttcacgacttctgtcgcgatgtgttctacgagttccacgatgatgcagcgactattgacgaagaaacgtaccgtcaagttcaagcccacctccccggatacctccgagttgacgaaactgttagacagatcgttaacctgcaagtatttcccagccttgaacacgttcgcaaaacgctttccacatggaaaggtccgctatcctatcaaccaaaatgggatctagctcactttgtgaatcaacccgacgtcgttcctcccgactcagtcacgctccacgaatatatgatttcacacaatcttgaagtcactatactccacaacctattttga

SEQ ID NO: 1578 - DNA, 1401 bp, Newman partiti-like virus
  source 1..1401: mol_type = other DNA
gccgacatgctgagatcacagggcttctcctttgaggagactcctcgatccgtttacaaggttgagaagctgtatgcatcgttggccggctatgcgcccaatactatccaggcgccgcagcagagtactgagtatgaggctggagtcgctctagcgtatagctgttttgcaaggccgaaagatcatgaggtcttgcacgtgctcgaaatgaatcctgagacgttgatgatgataacgtcaaacccctctgggtcggcgggactcaccaactacggctgctctaagcaagagagccaaactagagcacttgagcgtggcttgcagacgctgaagggtgaaaagcaaccggagccttgtttaggcttcgcccgtacgcaattcgatgacaagactcggttagtgtggggttatccctattccatgactttcatcgagggtttggttgcatggtcactcatacagttgttcaagggcggcagcacaccgatggcctttgctatgtcatcgatggcgctgggcacgaagatggaagtgtcatcctatcataaagagtgggcttattcacttgatatgagtcagtttgatgcgactattagtgccgcgctaatccacagggcgttcaacattctgcgtacgtggtacgatatggatgaagtggaaccggtcagtggcgtgaccgtcaagaagatcttcgatcttattgagaagtattttatacacaccacaatagtcatgcccgatgggtgcatttacattggcaaagatcatggagttcccagtggatcattcttcactcagatcgttgattctattgtcaatgtcatcattactggtgcgattgcttgtcacttctcacttcatgtgagtaggaaagacatttacgtccttggtgacgacatcctgttctggtcaaaccgtaaggttgatttggatgatatcgcagactatgctaaccgtacgttccatgtcaagctgcatggtagcgaaaagtcagccatataccactatgatgaggcgatacactacttagggcgtgattggtccaatgggctcccaaccctcgatcaggatgcgattgttgccagaatggtctatcctgagagattccgaagatactcaacagaggtcaaaaagaaagaacgggaggtgcgcatgctcatattgagctacgctgccacctaccgagctggttggcggattgcgtcgagtctattgggtgcagataggacgtggcaccaccaaggttgcgcgaacgtggatgttaacacctactgcgagggctccggtcgagatgattttgacttcgatatgcttagtggcctaacacgctacaggaggaaataccatttcggccatgttaagggagatataccgataacggcgacacagtattggctgtga

SEQ ID NO: 1579 - DNA, 1617 bp, Nigrospora oryzae partitivirus 1
  source 1..1617: mol_type = other DNA
atggaaattgcccaggaaccaaccaaccacatcatcgaaactgaggggtctcatttagttgacgcactccacctccgcccagccaagacgaggtcaaccaccagtgaagatgttcttccaaccaactactctgatcccaacttacgtgaaatcgctaagtatggtggttatagtacctactcctctaactcaaacaccgatccctatgttagagagagtctaaaattattcgatcgacaactctacgaagatgtccgtggtttcaccagacgcccacaaggcacaccgggaatgtacacttccctagccaagttcggaggtgaaaaatgcggtttcgattcattgtctgcctcgcaacaatcgtcgatgcgacgatccattgcgaaagcaaagcgtgctttcaagttgccctaccaacgtgacccgttggattggcatgaggtgggacaattcctgaggcgtgatacgtcggcaggatccaccttcatgggctccaagaaaggagacgtgatggaagagatctatcatgaagctagatggctcggacaccgtatgaaacaggacggaaaaggtagtttcaacccaagcaagatgcgcttcccgccgtgtcttgccggccagagaggcggaatgtcggaaagagatgatccgaaaactcgtctggtatggatttaccctgcagagatgttggtgatagagggattctacgcccctctaatgtatcaggactttatgaatgatcccaatagcccaatgttgaacgggaagagttcacaacgtttgtacaccgagtggtgttgtggactgagggaaggtgagacgctgtacggcattgattttagttctttcgatactaaggttcctgcgtggctgattcgtgtagccttcgacatattgagacagaatatcaattttgatacttggcaaggtaaacctgtttcaaagaaggacaaacagaagtggcgaaacgtttgggacggtatgatatggtactttataaatacgccgatgctgatgcctgacggtcggatgttccgtaaatatcgtggtgtgccttccggatcctggtggacgcagatgatcgattcggtgtgcaattacatcttaatcgactacttcgcagactgccaaaatgtagagattcgaaacctgaaggtgctgggtgatgatagtgcctttagatctaacgaccagtttgacctggacgtggcatctaaagatgctgaacctacgggtatgataataaagccagaaaagtgtgacaagacgaaagaccctgccaattttaagttacttggaacacactatcgtggtggtcatgcccatcgagacgacatcgaatggttcaaactagtgttgtacccagagtcgagcgtgcttacgttagacgtatcattcactagacttgtcggcctgtggctcggtggagctatgtggtctcgacgcttcatagcatatatggattacttccagacatgctatcctgttcctgaagaagggtggttttcaaaggatcagaaacgatggctagagatcgtgtattcaggcaaagcgccaagaggctggactaccaagaggagtctcttttggcgatcaatcttctatacctatggttag

SEQ ID NO: 1580 - DNA, 1617 bp, Nigrospora sphaerica partitivirus 1
  source 1..1617: mol_type = other DNA
atggagaaggctactcccgaccggcctgatccgcgtggcatgagggattcggtcgactgggacgctttccataaggattgtgaatcacttcccggtcttaaaagactatatccagatcgatggacatacaagtacaacatcgaggagacgcgaatgaacactgaccctttcgttcgcaaatcaatgaagctgtgggatcaagagacctacgaatcacttcgtggctacacgaagaaggcttctcttggcttaggccttgagtcgttcaaaatgttcggaaggcacgaattttccaaatcccgcatgccgtcagagttcaaagagtgctaccaaaaggctcttgctgatgcgaaacgcgtgttcacccctcatgaacgcctgtatcgtgtttccgttcccgatgtgtgcgataagatgaacttggactcagcagctgggttttcctacccctctaagaagaagtcagaggtaattgaagaggtgtttgacactgccagttacatggctcacttcattgcgagtgggaagcatgtttacgtaccaccagcaaagatcgcactccgcggtcacctttcagaagtcgaagaacagaaggttcgcccagtttgggtgtttcctgccgaagttactgttctggaaggcaaatgggcaatcccttattataagttcctcgaagaagaggttcctactgtccatttcggtgaaggtgcgatgcaacgcctggctaagatccttgtatctggactagcaaacgagtcagagtgtaccgaagtcactctcgactggtcaggtttcgatggcaacgttcccaattttatgattgatgacgccttcgatataattttcaattcctttgatgagaccgctgtgcatcatcaagggaatttggtcttcggcggcgaccacatggcgtcaaagcaatatccaatccaagattggctgcgtacttacttcaaaaagactaagatcatgctaccagatggttcagtctacaagaagttccacggtgtaccaagtggatctttcttcacgcaggtggttgactcaattgttaactacatatctgttatgatgctgagctactatttcggatggaatgcacaacgagttcgggtcctcggtgacgacagctcattcctgattccgaatggcgccggcaaagtaacggcagaggctgtctctgccgcagcttggtcttcgctgggcttcgtgctcaaagtgaagaaactaaggatcgcacagaaacagagcgaccgaaagtttctgggatatcaagtccaggcctacaggtacgaacgtccgacagaggagtggttacggatggttatgtatcctgagagggacgtcgagttcctcgaacaatctgcttcacgagtatttgctttctacttgcttggcggctgtaacgatgctgtgtattgtgatttctttcgagattacatcgcacggtatccagtcgtgtacggcaaggagctaccactcacccgcggtctaaagagactattcaaatttgtcttccgcatccaactcgacaatctggtatttcctgatttatcaagaattgatttgatgaaagtaccattcgctctatccatgggcgactctccattttcgtag

SEQ ID NO: 1581 - DNA, 1497 bp, Norway partiti-like virus 1
  source 1..1497: mol_type = other DNA
atgaccaatatgccggtctataggcgtatggaacgtgaccgccccacaaagaacagcttggtgtatatcactaaagttgagggacacacgatccagaaggatccacaaattgtggacccattcgtcagacgcgctctcatcgctctgctggacaaagacccagtcgaggaattctccgaattcactcgctccttctatacggaggagggtcactacttgaacctctggaagtacgatcgcaagatcactccaaggccaagcgatccagacatcgatctcgcgcttgaacttacgcgcaaggcattcgcacccactgaaccgatcctctccattggatgggactcgctcggtgaggttccctatattcctacctcttcagcggggtggaagtacaaggggccaaaaggtgctccaggaaatcacgagctcgcaatctcgcgcgccgtgggatcactctacgcatggcttgacagccagcgacccgaccgtgacaactaccccagatttcggtacacacccgatctggcgttcactcggacacagctcatgacaatggattcaccaaagatccgtcatgtatggggcaaggcgttccacaacatcatcctcgaaggaatgagcgcctctcctctgatccactactattcaagaatcggtcagccaatcgttgtaggagtccatctctacaagaagctaccttacctcatccgcacatgcctatgggacggcgaacaccgtcgcattggcgtaggtctcgacatgacaagctttgatacttgtccaatgccgtggctcatcaatgccatcttcgacatgattgagtcttacttgaccttccctgacgagatgagccaccacgcgtttagatatacgcgtaaattcttcatcgacacaccagtcatcatgcctgacggcagaatgtggctgaagaagttgggagtgccatctggcagttactacacccagcttgttgactcgatgattaactacaccgtcatcatgtacctccaaactaaaatgtacaaccaacagtttaccacttgggtacttggagatgacagcctcttcggaatccctgatgaacttgggtttcctgacctggacgaggcagcacgaatcgtgaagcgaattggattcgaactatccacacgaaagtgcatcgttgcgacacatcctggatctcttgagttcctgggacacgtgagtcgcggcgcatccgtcgaccgagaatggtcgaagatgattttactggccctatttcccgaaagggaagtcactgatccgggccaatctctcgcaagggtattcggtttgctcgttgattcggcactgaataatacaccactcatcacccttgcacatgcaatggaggctctctactcataccctgaaatgacctcacttgcacgagaagactcgaactggctacgagcagtagtcggagtcgagaagattcctccacacgttgacttggtgaaggtctggacgctcacttga

SEQ ID NO: 1582 - DNA, 909 bp, Nyamuk partiti-like virus
  source 1..909: mol_type = other DNA
aacgcgtaattattcgtgatgacgaatttggatatgtagtacgtgcagcctgggataagttcagtgtgactccagtgaacccaatccacctgaacgatatctttgatatggatttggacattcgcaagtccagccccggactcccgtggcagccacagtacaaaacgcgcggcgaagttatggactgtccagatgctaggacatcgatccgacgctactggcaccgcattaaggcaggagaagacctgacacccgatgattgcaaggtgttgtatcgcgcacatatccagagagacgaaccgaagatccgagcagtgtatggatatccgactgctatcacattgatggaggcatgttttgcactccctttgatcgacgagtacaagaaaggaaagacgccgttggcttacggatacgacatggcggttggtggagcctacaaactccgctctcgtatcaagaagtatcggtatttcggatgtatcgatttttccagcttcgataagacagtatcggcgcagttgataaagatagcattttccatactcgaacagaacgtggacatacgacgataccaaaagcatggtataccagacgcaagtagactgtaccgagcatgggactacctggtgaagtattttctggagactccgctccggttgtgtaacggcgaaaggtggaagaagaaggctggtgttccaagtggatcctatttcactcagcttgttgattccatcgttaattggattttgatcaactatgcgttcctcaagagattcggaaggatgccagaagattgcctggtctttggcgacgattcggtagtgtccagcaacagccacttctcgctggaggagataagtggccaattgtcggaggctggcatgaccgtgaatgttgataaatcca

SEQ ID NO: 1583 - DNA, 399 bp, Ophiostoma quercus partitivirus
  source 1..399: mol_type = other DNA
tgaacccattccttatgagttcacctacttacactctcgctcacacatggttcaatccgacaaacccgacaagatccgcgctgtctttggagttcccaaactcctattgatggtagagaacatgtttatctggaacatccagaaagactatctcaatggaccactcggtaagtcccccctcctatggggatttgaaaccattcgtggtggatggatgaagctgatttctcagctcacttccaaacctctcagttcgatcatctcagccgactggagtggctttgaccacaaagcacttcatgaagtcatcgatgacgtccatgatatttggaaatcttggttcgattttaaccaaggctacgagccctccctcagcaacacccatgactacaccgccca

SEQ ID NO: 1584 - DNA, 1341 bp, Palmetto partiti-like virus
  source 1..1341: mol_type = other DNA
attaagctaaacctcaattccgatctacgagcagtagagaacttctctccaaacgtaccccgaccctccccatatgcacaagctctgtttggagagaagttctctactgctcgtagatcggaattgaggtttagcttaatcaagaatgacatgttgaagatgggatccaatccgacaattattcgtgatgacgaatttggatatgtagtacgtgcagcctgggataagttcagtgtgactccagtgaacccaatccacctgaacgatatctttgatatggatttggacattcgcaagtccagccccggactcccgtggcagccacagtacaaaacgcgcggcgaagttatggactgtccagatgctaggacatcgatccgacgctactggcaccgcattaaggcaggagaagatctgacacctgatgattgcaaggtgttgtatcgcgcacatatccagagagatgaaccgaagatccgagcagtgtatggatatccgactgctatcacattgatggaggcatgttttgcactccctttgatcgacgagtacaagaaaggaaagacgccgctggcttacggatacgacatggcggttggtggagcctacaaactccgctctcgtatcaagaagtatcgatatttcggatgtatcgatttttccagcttcgataagacagtatcggcgcagttgataaagatagcattttccatactcgaacagaacgtggacatacgacgataccaaaagcatggtataccagacgcaagtagactgtaccgagcatgggactacctggtgaagtattttctggagactccgctccggttgtgtaacggcgaaaggtggaagaagaaggctggcgttccaagtggatcctatttcacccagcttgttgactccatcgttaattggattttgatcaactatgcattcctcaagagattcggaaggatgccagaagattgcctggtctttggcgatgattcggtagtgtccagcaacagccacttctcgctggaggagataagtggccaactgtcggaggctggcatgaccgtgaacgttgataaatccatttacacaacctgcgtcgatgaagtggagtttctcggatttaggatagaaggtggttttccctgtcgtagcctcgaaaggtggatggaggctctgtaccatccagaatggccagatgaggattgggacatgttcgccagtcgggccttagggttgttctacgcgaacgcgggagtgaatgggcagttttcccagatatgccgtaacattgtaggagttcgtgcgtttacgataaatctcccccggaggtggttttccctgtcc

SEQ ID NO: 1585 - DNA, 1434 bp, Panax cryptic virus 1
  source 1..1434: mol_type = other DNA
atggtaagaggcacattagttggttatgacttcctcaattttgatttagaacttgagaagactgatcaacaacacccccacatcgtacggcgagaacatgccgttacatatgtggatcaatatgctttcgagcatgttgaagacatgagtagattagctgaagagcaagtattgactggatggtcaagaagctactacgttccagagaaacatttggaagcgttactcaagtataatctaccaaacattcctgtttcgcgcatcagagttgacatttatcgacagtcaattaatgaggcgaagaataggttgcgtagccttcaaactgtgagggcttttgacgttctgactgaaatagatcaggtctcatacaagctgtcatcagcggcaggttacgactacgtaggcgagaaaggtcctattggaggcgacaaccacaaaagggcgatcgcaagagccaaggcaatactatggtcagccattgcagatgatggagaaggcattgaacatgtcatcgagacttcagtaccagacgttggttacactcgcacacaactggcggatcttaacgaaaagacgaaagtcagacaagtttggggtcgagcatttcactacattcttttagaaggattagttgctggtccattaaccaaagctgtcatgaacacggacacgtttattcatgcaggaaaagatccaacccagagcgttccgaatttattatcagatatcgcacgcgactgcaaatggaaatatgcattagattggagacaatttgacgccacagtaagccgttttgaaattcatgctgcatttgacatcatcaaacagtacatatcatttccgaactacgaaactgagcaagcatttgaaataactagacagttattcattcataagaaagttgctgcgcccgatggttttatatatcgttcgcacaaaggaattccttcaggaagctattacacttccatcattggatcgatagttaactatttacgaatagactatctatggagagtattatcaggtcatacacctatacatatatacactctaggagacgactctttagttggagacaacatactgctacaacccgagaaattggcagaagttgcaaacaacataggatggcatttcaatccagagaaaaccgaatattctacagtaccagaagaagttacattcttaggtcggacatatttaggcggtttaaacaagagagacttaacaaaatgtttaagattacttgtataccctgaataccccgtagaatcaggtaggatttcagcttatagagctaggtctatagcagaagacgcaggttcactcagtgatcttctaaatagagtagcggataggctaagacgtaagtatggtatcgcgtcggacgacgaagtacccgactattttaagcgttatgtattttga

SEQ ID NO: 1586 - DNA, 1434 bp, Panax cryptic virus 2
  source 1..1434: mol_type = other DNA
atggctttactcaacattacaggatacgactttactgactactcttctgaattagaagatctacagcaaagacatattcatgtagttcggcgggaaccgaacattacctaccaggatgaattcgcattaggtgaactcttgatagataattatagactgtatgaacaggaacttgtgggctggtccaggagttattactccggcgaggaacacatgaaagctattttcaattacagttctcccaacacaccaataactaacatagatgtcaatttgtacaaacaggcaatggcaaatgttagagaatggttaagtagccttccaacagtgagggcattcaacgtcttgacggaattaaatcaagttcgttatgaaccgtcttcggcggcaggttacgactacacaggtgcgaaaggtctaatcgatggtatcaaccacgatagagctattcgacgagcaaaagctgtgttatggtccgcaatcgcaccagacggcgaagggatcgaacacgtcatcaggacatcagtgcctgacgtaggatacactcgcacacagttaactaatttggaagaaaagacgaaagttagaagcgtatggggaagagcattccactacattctacttgaaggaacatgtgcacaaccactactcgatgcatttaaaatcggggaaacattctttcatgtcggatcagatccaacagttagcgtaccacaaattttatcccatattgcaggaaattgtaattggttatatgctttagactggagctcatttgatgcaacagttagcagatttgaaatcaacactgcgtttgatataattaaacataaaattgaattttgtaattttgaaactgaacaatgttttgagatttgcaggcaattgtttatacacaagaaaatcgcagcgccagatggtaaaatttactggtcacacaaaggtataccttcaggaagttattacacttcaatcataggatcaatcattaatagattacgtatagaatatatatggctatcaattaaaggaagaggtccaaagatgtgctacacacaaggagacgactccatatgtggcgacgatgaaagagtaaaatctgaagactttgctgacatagccaacaacattggatggctaatcaatccagcaaagaccgaaacgtcacgttacccggaatttgtaacatttctaggtcgaacaagctacggtggcttaaaccacaggaacttaattcgatgcttgagattgttaatctttccagagtatccagtgcccaacggtgctatatccgcttaccgcgcacaagcaatagcaacagatgccggcaacacaagccaaattctgaacgctatatcgcgtcggttaagattacgctacggtgtggcttcacacgatgaagtcccaaaagagcttagactttacaaagtctag

SEQ ID NO: 1587 - DNA, 1079 bp, Panax cryptic virus 4
  source 1..1079: mol_type = other DNA
atgattgatcgacgaatgactaaacgtaatctctacaacgaaatgtttctcattaaccgaaagaatatccatcttattaaagatggacataagacaaatgactttggtcatgacctccgttattggcatacggcctttgcgcgtcagcacctagtctacaaagacgatcctgataaggttcgcctagtcttcggagccccgtcaactttgcttatggcagagttaatgttcatatggcctatacaagtaagcttgcttactcgtggtcctgaatccccaatgctttggggttatgaaacactcaccggcggatggtcccgtcttcactcatgggcagcacatgccctacctagattcgagtcagtcgtgactctggattggagccgctttgataaagatgcaaggcactctgtaattaaagacattcactctttggtcatgcgaccaatgtttgactttaacagaggctatcatcctacgaagccctatcccgatacgactagcactgaccctataaggttagaaaacctttggaattggatggccgacgccattttaactacaccattgatactacctgacggtcaagtattgcgattcacccattcgggtatctactctggatatttccagacacagattttagactcaatgtataattgcgttatgatcttcactatcttatcaaagatgggttttgatctaaacaacatagcaatcaaagtacaaggagatgattcaatcttcctcttgcaccaacattacatcacaatcaaggaaacatttttaccatttttcacaacttacgcacagcaatattttggctcatctgttaatcagaaaaagagcgaaattttaccttcacttgaaggcgctgaagttctaaagtaccgcaaccacggcaccatgcctaagcgagatgaactacaactcttagctatgctcagacatcctgaacgtacctcatcactaccatcattgatggcgaggtcaatcggaatagcatacgccaactgtggaaattacacccgtgtataccaaatttgcgaggatatttataagtacctggcattgggcgg

SEQ ID NO: 1588 - DNA, 1740 bp, Partiti-like adriusvirus
  source 1..1740: mol_type = other DNA
atggctaaattctcttctattaatccacctaaattacagaagcgaagtagattattggtaaaagactctgatagatgggataatcgtgacatgtcttatttccccatagaatacgatgattttaaagttcgtaactcgagtgacttttatttcgcgcaaaaatgtcagagatcatcggttaattatagtcgttttgttcaggacgttatctcaaagtgggtctctttatttgaggaagtttctgctattgactgttataagcatgttccttttatggataaaaagcctttcctcaacagggttaatccgcctcaacctgaaaatgtggttcgtgagtatatcattcgcgagtatccggaatattcttggcttcctgataaattggacacctccgatttcagaaagcaggacagatcaactgcgattaatttcataaaaccttggggtatgtcacaatacatagacgttgataacttccttcacgctctttcggatatgtttagcctagttgggctacccatggattatagaaacaaatcatttgaagaattcaccgagggaatgaacaatcgttcatcaagcggttttcctttatttgttaagaaaggaagtgacgctgcaattgacgagtgcagggaatatattcacagactaacaaatggggaacttgatgcagtggaaggtttgtttagtctaccgactgttcttttccatagatttactccaaaagttaattctaagaccaaaactgttaaggttaaatcccgtgctgtttttgggtatcctatgtcaatcattggaatcagtgaaatgctttatggtgatctaattgataagattctttcagctagtcctttcttacttggaaaaacaagggttgagttatcgaacataactcttgagatgagaagaagtgctatgtatgagagttgtggtatattatcacttgatattaatcagatggatcaaaagcttagttattcactacaactacttactcacgcaataatttattgctgcaactgtgagtacagtaaatacccgaatctagatcagaatggtattgaaacagctttagcagcctatgagatacatggtcctacttttggaaactggggcacaatgatgctcaataatggaggaacgaaaagtggtactaggtggaatacactaacaaactcgctttcacttttgttagcatccagattatttactagggagagaaatggatctaagtttgtggagttagagaagggcattggtgatgaccaaatcaagaaagtccgaatgaggaatccacttgacgaagtagagaagaagttcataattaggaaggcaactgaatgctacaggcaattagctttaaaattacaccctgataagtgtaaagtatgtagcttcatggatgatctacctgttatgggtatggactgggatatacaaggaagaccaaatcgtcctagagactgggtcgtttcaaaattagcttatcctgagagataccgtagacaaaaattcgatgagagattcgtcataagatccgcttcaatactttttcaaattcataggggtttggagtactttgaaaaactagtggttccaagagtaggttggttagcacatgccgtgatcaacaaaagggatcccacccttacatattaccacagtagggacggaccaatcaacgagactcgtcttccgcttagtgcgttggtgaacaaaggatggaggctcttttga

SEQ ID NO: 1589 - DNA, 1830 bp, Partiti-like alassinovirus
  source 1..1830: mol_type = other DNA
atgaaagtgaaaggctataacaacgtcatctactttggaaacacggttaagattatgatgcttaacaaggatacattatatcgttctaaaatgtataaagcttggttgcgtaacattaggcttgaagggtgcaagattcaaggagctcacgttcgacgggagggtaccgaattcatgtgctacgataaaatgttaaatctaattaatccgtcaaatcaatcgttagaccatctcctttctcctaacctgcgtagattccgtaaatatttctcgtacatagttaaactgttgagaagtcaagctggagatttaggtcgttttaagtattccgaggtaattttccaaccttggttgaaaactcgactgttgtctattagattaccagctgtggagcattcaatgctagctggcgttgaaaatatgtttggttatttacgtggtaggcttccatggaaactttgggtcactcatcaagatattcttgatgctgatgttgccaatgtaaacgcgcattgtgacaacaaaaatgcaaaaattgagtggcacaacctgaattcattacatttcttttgtgctgtgggtgcgaccatactcggttttcggctggatgggatttcacaacattacagaatgttgcgtccttgggaagcgcttgataatttgccgcatgacacatccagtggataccctctttttaagagaaaagattctccggaagctgtttctgatgctatcggttggattaagtcgttcgaagaaatgagaagtttctcttcgaaattttcgagcttaataatgaatccagtcgtgattttccataggtttaccactaaaataagggatttgagagggtcagcaaacatacgacccgatatcaaaatacgccaagttttcggtgtttcttttagggtaatgcttttggaaacgatgcttttccaaaaagttatcgattttgtgtcgagcgaaggaaagttccactcaatcggtaaaacaagacccgaaatatcagctcaagtatctttgattcggcggaatgcattcatcggacatcgagctgtgttctgtggagacatttctggaatggataagaatttaccgcttttcctagtcgtctgtttctttgctagtttgcttgcggtggtaccctttagcggatttgcagttgtttctgtcgccgcggtagctgtttaccactgtttgaccccaattcttacgttctctggtctctatgttacaaatggtggtaacgtgacgggatccaagttaactagtttactgaacacgttttgtttgagcgtcgtggtcaactactttttctttaaggtatggggccgaagcgtacgtgaaggcgaattctttgttcaaggggacgatttcgtagtcgtgttgcctcgagggtttgtttaccatttagcgagagttttcggttattttaacctttctataaacttgaggaaaagtaagtacgtaaccgagatcggtggcgatttgattgattacttgggttttggatggcatcccaatggttataccgataacgctgataaatggtggattgcaaaagtcatttatccagagagatatgttgatgatgcctcaggtttcttcggcaggtcgttcatccgcttctgctcaattatctttcagttgaaacgaggccccgaaatctttgatcaatttttcgaggccaatccggttctgaagaagcagttggatgtgtatctgaaagctggtgatccaattatctatcatatggataaacgtggaaagacacatctcggtagaatacctttgagtcaattacgattacggaattggacttgctactaa

SEQ ID NO: 1590 - DNA, 1707 bp, Partiti-like lacotivirus
  source 1..1707: mol_type = other DNA
atgcggtgggatcatttagatattcggattaatcatttgagaatacggaagttgttttcaaagtggctgacagataaggtagattacagatctaaaatagatcatgggactttattcgcttcgggatttgaatttctttttgataaccaggttcttgataaagagaatcgtgcatttgtgaaaacatttcggatgctacacgctaaattgtatagtaccgttaagaatgttgcaggcttaagatctatcgaaattaattttccaatagcgcttaagactagattatctgctataagtttcggaggaattgagactagattaaaaggttgttttgaaaaagcttttcctcagtatcaaaatagattacctgagcgtactgtaatttcaagacagcaagtattggattcagataaagatacacttacggtttacgccaaattcaaaactgtgaatgttaaatatccaaaattactactgagagctataattagcgtagttaatcaatgggatgcggataatctgtcaaagtatactcttcctgtgcaatcttgccttgatgcgttaccgtctgatacctcttcttgttatcctgttttcgctaagaaaaattcggaagaagcaatttcacaactgtacgacgatctaaatactgtggagaaaatcgcaaaatcacaaggaatttttgaattttttgttagaaatccttgcgttattttccatagatttagtaactctttaaaagaatcattcggaaggcgtaatttagaaacgaaaattagacagatcttcgggtacccatttcttgtgttagttattgaaactatgatattttcaaatttggttgactgtattgtggctaaaacgacttacatgatatctggatatagaagaactgatattgcgcatcgtgttaaaagagtgcgggctaatgcttctgctactgataggtctgttttctgcttagacattagtggtatggataagaatttagctagtttctggattatagcgttttttactagtatgtttaatttgatatcaccacagggtcggatacgagagtatttctttgccataatgagttatcaaatatttacacctattctttctttatcattcggtgtgatctttactgacggtggaaacgttagcggaagtaaacttactagtattctaaattcgtttgtggtatcttcagctttagtatattgttatctagtatattatggtagattaccgacaacagacgaattaagcggatatggtgacgactgggttgttgtaatagacgcggagttatcccagaaatttattaattcgttggcagagctaggattagcggtttcggcaacaaaaagttctgtttgtgatcccgatttggataacatcaaattactgggtttttattgggatctcgaacattcgccgacaaatacattagattgggttatcgctaaaacagtatatcccgagagatatgtagatgagaaggggattggacgagtatttttgaggttagcttcagtgattttccaaataaaggacggacctatgttatttaataatgtagttcgacaggatcctcaaatgctggaaatgtcttacgatagtactgttaaaattgaatttttagataaacggaaaagaacacatttgggttctgtacctctaggtttattacgagaacgcggttggacttgttattaa

SEQ ID NO: 1591 - DNA, 1381 bp, Partitivirus-like 1
  source 1..1381: mol_type = other DNA
ttgcataggagtaccataagttatgaagcaatgcttcaagatctttttgcttatgatcgtgaacccacggtttgtaaccgtgatgacgtatacttcgctgtacttaactcgatccggcaagatctggaaagtttccctactatcgttcccttaacgatgggtgctgtgcctcagaggcctgacttccccggtcagaagtcccctggtcttccctacaaacttcaaggtttcagaactaaacaggaagtcattgatgctggtttgctgcatgagatcaatcgcgactggcagagcattggcttcaagaaacgcagggttgatttgccagacgtctgtttgtttgcaagagcacaaatagcacgtagaggtagagaaaagattcgtgccacttggggttatcctctatctgtctatctagaggagggacgtttcttctaccctatacacgatgccattaaggcaaggcatcataactttcctatagcttatggttacgagatggctaacggtggaatggaagtaataaatgagttgcttgggaggaatccagacagcaagtacctatgtgttgactggaagcaattcgataaaactgttccgccttgggtcatcagagatgcattctcattactagcggaaaagatcgattggggccacgttcgcgatgttgagggcaagatatggcccgtaaatcctgtaccttccaaacgtcgatggaaatgtatggttgattattttatcaacacgccaattagaacgtgtaagggagagaggtttttagtgtcacaaggcgtaccgagtggttcttgttttactaacttgatagatagcctcatcaacgcgctctatgtgaggtacactatctatcaaaccacgtcctctctcccagtcgacgagatgtatctaggagatgacggtgttgttgtggttaatgggattatcaatctagaaaacatggctgaagttgctctagaaaagtttggagctatccttaacatcgagaagagttatattacaactcgtaaggataatgttcactttcttgggtattttaacaaagcgggttttccctttaagaaccaagattttctcattgcttccttcatccagccggaacacacccgaaaggacgccctagatgcatgtgctgcaggactcggtcagctctggagtggatttgacgctgtatatgctagagtgtggcatagagtcattcttgacatcgctgccatggatggaattgcaaaggatgaagttgttttccacctacgcgcaactgcccaccggcataagtatctcatgcacattggtctggatccacgtaccctgagtctgcctgtgcccaacgagaatgggttaattctcgacgtccaactcaaac

SEQ ID NO: 1592 - DNA, 1692 bp, Partitivirus-like 2
  source 1..1692: mol_type = other DNA
aaaatgagttctgcggatagtaatccaataaagtcgttaccatcagctgagggatatccattagatttgagaccaccaaggtgggactcgatcgctgtaaaatattccaatctcatattcggatcgcgagtagtgtcaggggttctgaagaagtatcatagatcacgagtgtcgatggatgcattgcaagatgacgtgtttgagtataattgcaaattgccttcccgacccaatgatgatcctatttacattgctgctctacagtcggttcgccgagaattcgtaccgcaaatacctatcataccattgacgataggagccgcttccaaagtgtcaacggtaccaaaagataaatctcccggtctgccctggaaacttatgggctttaagacgaaggaggacgtctttgctgatgacgacgccatgagacagattcgaaaggattggatccttatcggtaggggatatcatgtccgtttacctgactgtctcgtgtacgccagagcgcagatttgtgacccgagtacaaacaaggtccgcgctacatggggttacccaactggcgtgttcattgaggaggcgaggtttgtttacccttatctcgattttctcaagaacaggagggacgactaccccttagcctacggtgtggagataggtaagggaggcatgggctatgtcgatgagatgtttcaccgtgctggttctggagtcaaagctgtgatgatggattggagacgctttgacaaacaaatccctgcttggctagtacgggatgcgtttgcactattgaaagagtgcttcaggacggatgtcgtcgtggatgttgaggggaaagtgtggccagttaattcgcatattacaaatgctcgctggtcgaaaatggttcagtattttataaatactccatttcgcatgcccgatggctcacgttatatgaagtctcacggtgttccgtctggctcttgtttcaccaatatcatcgattcaatcataaacgctgtagttacaaggtattgtgtgtaccaaactacgggatcgttccccgagtacgatttgtacatgggcgacgatagtgtgttcgtgacaagaggtgtcgtaaacctcgatgatatagcttctgtggctgaagagaccttcggattcacgttgaatgtgaagaaaagttacgtgacgtcagagcgcacaaacgtacagttcttaggctattacaacgattcaggatatcctattagagaccaggactttctgatcgcttcgttctgcctgcccgagagggtacaggagcccgacccagtcttcacggctacccgcgcggtaggccagatgtggtcgacccttaatggtattgccgcccagaagtggctacttatcattcaaggtattgagaacgagtacgcactttctcctcagtggtttgtagaccacatggccgagtgtcctaacagcttgaagtttcttcggcttcatggcttggacgctaacagttttccacagcccggaaatttcgatgtggtagatgcgcctatgcgaccgcctttccgacctttccgtagaaatccagttcgtagggtcaccgacgtcaaggatctgtattatcaatacttagacgatcccattcgcgtcgacgactggataggcttggaacgtgacgacatacctccggatattgaggatgacgtcctgtgttaa

SEQ ID NO: 1593 - DNA, 1626 bp, Partitivirus-like 3
  source 1..1626: mol_type = other DNA
ttgagaccaccaaggtgggactcgatcgctgtaaaatattccaacctcatattcggatcgagagtagtgtcaggggttctgaagaagtatcataggtcacgggtgtcgatggatgcattgcaagacgatgtgtttgagtataattgcaaattgccttcccgacccaacgatgatcctatttacattgctgccctacaatcggttcgccgagaattcgtaccgcaaatacctatcataccattaacgataggagccgcttctaaggtgtcaacggtacctaaagataaatctcccggtctgccctggaaactaatgggcttcaagacgaaggaggacgtctttgctgatgacgacgccatgagacagatacgaaaggattggatcctaattggtagaggatatcatgtccgtttgcccgattgtctcgtgtacgccagagcgcagatttgtgacccaagtacaaacaaggtccgtgctacatggggttacccaactggcgtgttcattgaggaggcgaggttcgtttacccttatctcgactttctcaagaacaggagggacgactaccccttagcctatggtgtggagattggtaagggaggcatgggttatgtcgatgagatgtttcaccgtgctggttctggagtcaaagcagtgatgacggattggagacgctttgacaaacaaatccctgcttggttagtacgggatgcgttcgcactattgaaagagtgcttcaggacagatgtcgtcgtggatgttgaggggaaagtgtggccagtcaattcgcatattacaaatgcccgctggtcaaaaatggttcagtattttataaatacgccatttcgtatgcccgatggctcacgttatatgaagtctcacggtgttccgtcaggttcttgtttcactaatatcatcgattcgatcataaacgctgtggttacaaggtattgtgtataccaaactacagggtcgttccctgagtacgatttgtacatgggcgacgacagtgtgtttgtgaccaggggtgtcgtaaaccttgatgatatagcttctgtggctgacgagaccttcggattcacgttgaatgtgaagaaaagttacgtgacgtcagagcgcacaaacgtacagttcttaggctatttcaacgactcaggatatcctattagagatcaggacttcctgattgcctcgttctgcctgcccgagagggtgcaggagcccgacccaatcttcacggctacccgtgcggtaggccagatgtggtcgacccttaatggtatagctgctcagaagtggttacttatcattcagggcattgagaacgagtactcactttcccctcagtggtttgttgaccacatggccgagtatcccaacagcctgaagtttcttcggcttcacggtttggatgctaacagttttccacagcccgggaacttcgatgtggtagatgcacctatgcgaccgccttttcgacctttccggagaaatccggttcgtagggtcaccgacgttaaggatctgtattatcaatacgtagatgatcccattcgcgtcgacgactggataggcttggaacgagacgacatacctcctgatatagaggatgacgtcctatgttaa

SEQ ID NO: 1594 - DNA, 2053 bp, Partitivirus-like 5
  source 1..2053: mol_type = other DNA
ttgcaagaacaacgcacacgacaactccatgaaacacgagaatttcaaaaagctgaacaatcaaaacaattgattctctcaagaaatcccgactccgacttacgtcgcatgtacgactctctacgagaccgcctcacagaacgcgaaaaacaagctgcattacaatccgaattcgacaaaattctgcaatcatttagactcaaaaatctagacaaacgcgaacccttcgaattttatatcgacgcacttgatcttagcttaccagctaatcgtcttcctgccccaggcctcaccgctctgaagtttaagtttcacactggacaaacagtcaccataaccgaagaagttcctgaaaccggctataatgtacatccaatcattcaatatttgataacatgtaaatatccacaatatcagaaatttatcgacacttattgtcgccctcttggttcaactgacgctacgtttgctgacttcaaccgtgaacagattgattcgaaaccaattccgtctgaccgacaacgaaagattctttctcatgtaactcgtatcttagacatacaaccctatttacctgttcattttgtcgatacttcatacgcgaaaattccacttaacactggaactggttatcacaatcgccattcatttaagataaatgcacacgcgaagtattccgctcccgatgaatatcgagatcgtcctacctccaaaggcttttacgttaatgcttttttggaatcatccagaacattgattcattacatcaagttaaatggttttccttttagctccgacacaaaagttgcatccaatccgaaattacgaaaatctcgtatttttagattctatcttgaatacccaacccttttattcacaaggtcacacattagtgatcgcgacttagctctaaaatgtcgccccgtttatgctgttgacgatttatttctacgaatcgaaacaatgcttactttcccactccacgtaatggccagatcacacaactctgcaattatgtatggactcgaaacaatccgcggaggtttacaatacttagacaaattagcaatggaatttaactgttatgcttcccttgactggtcacaatttgatcaacgcgctcctttttgcctaatcgatttattttttcgcatcatacgcgataatattatcatttcacatggctatcaaccgacctacgaatatccaagttacccagacctaacaagtcagaaaatgttcaaacgaatgaataatctcatcaactttattgaacactggtattacaacatggtttttgttactgctgatggattcggctataaacgaaattatgcaggtgttccatctggaatgctcaatacacagtttctcgactctttagtgaacttatcatccataatagatggtatgcttgaatatggattcaccgatcacgagatcgaacaattcagattctttataatgggagatgacaacacattcttctgtgatttatcgatcactgaacttaatcaattcatcacttggttctccacctacgcacaagaacgttacaacatgaaattaaatactgaaaaatcaacagtcacctgtttgagaaaccatatttcagttctttcatacacgtcaaacttcggcatgcccatccgtccactcggaaaactagttgctcaactatgttatccagaacatggtacgaaaatgcgctatatgtccgcccgtgctataggaatcgcctacgctgcttgcggaatggactttacttttcactgtttttgtgaagatgtttatcattcatttctaccgtacgccgctgactacacaaaggctgatattgaaaatatcattaagcaccttcccggtcaatttaaattacttgacgcttacctcgaaactgtaaatctaacacactttccttcttactacgaaattcgtgaaatagtttcaaaatggcaaggcccgctttccgaacatccaaaatgggatttatctcatttcatcaatccagttcgtgatatacctgacaactaccaaacactgtctcaaacac

SEQ ID NO: 1595 - DNA, 1536 bp, Partitivirus-like Culex mosquito virus
  source 1..1536: mol_type = other DNA
atgcatcgtgcttgcccatcggtggagtgtatcagagctgacgtcgacgactacaaccgtcagtatgtgcagagagttcagaacgatacatacttagcagtgctggagtccgtgcggaaggacttcgtacccgagaagccgctagtgccgtggaccttaggaagatgtcagaagcaaggaatacctaaagataagtctcctggtctaccgtggcgcgaacgtggttacaaaaccaagcgtgaagttctcgaggatcctgctgcgtgcaacgagatccataagtattggtccctagttggaaagggatatcgtacgagctctcctgataccatggtgtattttcggagccagatatgcggagtggaagctaacaagattcgagcgacctggggttaccccatggcttacaccctagaggaaggacgtttcgtgtacccttacttggagtggattcgccatacgaagaaagacgtgcccgttgcctacggcgtcgagatggcgacaggaggtatggcttacatcgacaacgcgtatcaagactgtaagttagctgatcctacagtcaaaacggctctgctcgattggaggaagtttgacaagtgcgtacccgcttggctcattcgtgacgcttttgagatcatgctgcagtgctttaccctgaacaaggtgctgtgcaatgatgatcacgagtggaaagtggatcccgcgaagacccgacttcgctggaagaaggtggtcaactacttcatcaacacccctttcattttacccagtggagagagatatcaaaaggagggaggcgttccttccggttcgacgtggactaacatcatcgatacaatcatcaacgccatcgtggttcgatactgcatgtttcacgtgacaggatcgatgcccatgttcgacgtgtacatgggagacgacagctgcgttttcatcagcagaggtatcgatttgaccgagttctcgaaaattgcacatgctgaattcggcttcatcctgaatgagaagaagtcctacgtcactggagaacgaacgaacatcactttcctgggttatcataattattacggaaaaccggtgcgagatggcgattttcttctggcttcctttatttatcctgagcgcttccatggaaccccagatcctgcgtttactgcaatgagagcagttggtcagatgtggagctcacttaacggagtccttgcatgtaagtggcttgacctgatcgaggatatgcagacgcactttggattcgacgtcaactggtttgcggaccatgtgaagcagcaccccggagccctgaagtacctacggttaactggattcgatcccaccctactacacgtccctcaacgaaaaggatggatcgtaaccgaggtagaacctccccccgttcctagacgggctccttccagaagacgctacgatatgctcgtcctgtaccagtcgtacttcgaacattacctcacagaggaccaagtctggtcctcttttagagacgagcgtgttaaggccctgccggtagatctgtaa

SEQ ID NO: 1596 - DNA, 1617 bp, Penicillium aurantiogriseum partitivirus 1
  source 1..1617: mol_type = other DNA
atggcatttactcaagaaccaactcaacactacgtcttagctaaggggtctcatttaattgactcactccacctccgtcctgcaaaggcggggtcagccactagcgaagatgtgttaccaaccggctataactctccgaacctacgagagatagccaagtttggtgggtactcaacctactcgtctgcctcgaacaccgatccttgggtcagagagacgttaaaattattttcaagagaacgctacgaggaaatctacggtttcaccaggcgaccagagggtacaccagggatgtacaagtccctggccaagttcgccggtgagaagtcgcactttcgtgatctgactgtgtcacagcagaaagcgatgcgccgttcaattgccaaggccaagaaggcttttaaactaccatacaaacgtgaaccacttgactggcacgaagtaggtcagttcttgcgacgtgatacgtctgcaggatctactttcatgggtcagaagaaaggtgatgtgatggaggatatctatcatgaagcgagatggttagggcatcgaatgaaacaagatggagagagtagcttcaatccaaccaagatgcggttccctccgtgcttggcaggccagcgtggcggaatgtctgaaagagatgatccgaaaacgcggcttgtgtggatctaccctgcggagatgttggtgatagaaggattctacgctcctttaatgtatcgggactttatgaacgatccaaattcgccgatgttgaacgggaagagtgcccctcgcttgtacgctgagtggtgctgcggtttaagggaaggtgaaactttgtacggtctcgacttttctgccttcgatacgaaggtgccgacgtggctcatctatactgctttcgacatattgaggcagaatattgagtggtctacttttcaaggcaaacctgtgagtaaacaggatgcccaaaagtggcgaaacgtttgggatggaatggtctggtactttgtgaacacaccaattttaatgccggacggacgcatgttccgtaaataccggggtgtcccttcgggttcctggtggacgcagatgatcgattcagttgtgaattacatactgatagattatctcgctgaatgccaggaagtagaaatccgaaaccttagggtgctgggtgatgacagtgcattccgatcaaccgaccagttcagtctggaacaagccaaggttgattgtgaaccaacgcatatgttactgaagccggaaaagtgtgagaaaacgaaagacccgtgtgagttcaagttacttggaacgacgtatcgggacggacgtgtacatcgaccgactgaagaatggttcaaactagtgatctacccagagtctagcgtgcatacgttagacatatcatttactaggcttatcggcctgtggttaggtggcgccatgtgggacaaagaattctgtcgctacatggacttcttccaatcaagctatccgtgtcccgaggaggggtggttctccaaggatcaaaaacgatggttagaagtcatctattcaggcaaagctccaagaggctggactaccaagaggagtctattttggagatcaatcttctacgcttatggctag

SEQ ID NO: 1597 - DNA, 1722 bp, Penicillium aurantiogriseum partitivirus 1-cp
  source 1..1722: mol_type = other DNA
atgtcaagacttcgcttcttgcggaaggtttctcgctttcccgctcgaaatgaaactcacttcgacccatatgttcacgcggctctagacgcggtctccggacccaatgttaaagagtacgtttctaccattcagtctgagtggcatagaccctccggggataatgctattctagaggataacctcatggactacggcgacatccttcctggacgttcgttcgatggtgcatacttagctattctcaagaagactcttgacgaactgaaacccgctgaacctatcatacctctcacccttggtgcagcagagaagcatccccggatgccttcttctacctcacctggatttccttggactaccaaaggctaccgtacaaaacgggacgtctttgaggataagtccgcaactggaatgatccaccgggcctgggattcaattggtcgtggtatagcatggcggttaccagactgtctaggctttcaccgaacggtggcttctgttaaagagaagtccaaaatccgtcccgtgtggggttttccaactgatgttatcgttgaggaagctagatacttctttcctttgtgggaagagttgaagctaatcaacaacgagcgcgataccttttatggtactggaatggagactatgctgtcaggacatcaacatcttgcccgcaacttcgacaccccgagtgtcaagtacgttctcaattccgacctatctcggttcgatgctcacgtgccatcctgggtcattcgtgacgtcttcagccacatttcatcgtggttcgacttttcacgagttcgtgactcagaagggaaaatatggaactgcaatacgcaacaaacctgccgccgctggaaggctatggtttcgtatttcatcaacaccaaggttcgcatgcctagtggtcttcgatttcagaagagccaaggcgtaccttccggttccatgttcaccaatctcattgatacctgcgtcaatgctgtccaattccgtactgcactttaccatgcatatggagagttacccatcaaagactattactatggcgatgactcctgtatcttcctccgggaaataccagatttggaagcaattgcaaaagttctgcttcggcagttcggcgctgagctcaatgttgacaagacaatcctgtccgacaacccagacaatatacattggctaggttattactatcggtccacaggacccagaagatcgctcgattttattatcgcttcttccttgtacccagaccgtgaaatcgagtctcccctcgattccgctgctcgcctcctcggccagctatactcatgtatggaccccaaggttgcagttactttttatgactgtatcacttggttgcagtgtactttcaacatcaccacaagtgatttgaacagttacgtcgcttccttgccttcaaaagcaatgaagtatttaaacactttaggcttagaaacttcagagatatcgcttccgcgatgtgctgccgatccgttcggtggtcgctacatccctgatctcctaccgcatccgtgcgctcggaacttctttcgctttcgtgacagacacctgccgcgcttcgccttttgtgctgaagcttaccaaaaccgctccttacgacaacgcatcttcaaagatctagacaaatattcatctacttttaaccaacactttgactacgatcttgatgcccagtattttacggactag

SEQ ID NO: 1598 - DNA, 1710 bp, Penicillium brasilianum partitivirus 1
  source 1..1710: mol_type = other DNA
atgatagaaggaattcaaaacgtttatcaaagaggcgtcgctcttcagcgccgtctacgcttgagagagctatatcctgaagggattgtgccctacatcaagaagttggagtacgatggaactatcgctagtactatcggaccctgcgcgaccgtcgcaccgcctgtgactaagtcgtttcgtcgcaagtatccgctcgagctctatgagaagcgcgagtatacgtatgactttcaacatatgctgtatattggaaagatggacgcatattcgtttaatacgtctgtgccaaagtttgacccttggttccgctctgttctgaaagcacgcgctcctgatttggttgcacatctggagaacacgtatatgagagatccttgcacccctgaacgtatcacccgtcatattgcgctttttgacaggacttggttaagtaaaccaaatgatattttcatgcaccaagctgaacagatagttaaagatctgttcgcaccggtaggacaagttgaacctattgatttcaactacgctggctggatggagatccttccccatctagacatgacgtcaagtcctggccttcccctccggcgtgagtaccacacccaaggagaatgtctcggccacatttacgataaaactaaaaggctgaaccacttcgctaaatttctacctccgccatcagtgcgcgcccctccttgtatgataggagttcggcccgggctgattcggcgcgatgagcttgactctaaaatcaaggctcgtggcgtctgggcttatccggcagaagttaaagtgatggagatgcgcttttgcgtacctcttatgaaacgtatgtcatccgtgttcggtaagattccttatctgactggacgtaacatgaacaaagctttgcctttctgcattgaccatcttttaaacgatgggaactttggttttgttactgatgtgtctaaactagatacttcaattggacctgactacatcgattgggcgtttgctttattggcatcgttctttcacatgggtatcaccgcttcatccgttaaacgtaacgaatcggtttttgatttcctgaagtattacttcaaacgtaccccaatcctcctgccttctggacagcttgttcggaaacagggtggtgttccttctggttctggtttcacccaactagtggacaccttggttactactctcttcaccgtttatacaatgttgagaatgggttacactcgtgctgatatcgaaggcaagatcttcgttgttggtgacgatatggctacttcggtgcctgaggatttcgatgtcccaaaattcgttgagctagctggtgagctgggttttgatatcaacctttcgaaggttatgttttctaacaaaggtattgaactcaagtttctcggttactccaaatacggtggcggaattttccgtcccccggaggaactccttcaaggagctttctttcccgaaaagttcgtaggcaatcaggaccgtgcgcgtcagcgcatcctaggtcagaccattgcctccggtctctgttcaggttttctttcaaaagtaaactactggatggcagacctcgacctccaacgacctttcgacccgggagaatcttacattccacaaaatagatggcttcggaatgtattgggtattgaagaactcccaacatctacaattgtcttcgacctgtacccgctcgtttga

SEQ ID NO: 1599 - DNA, 1620 bp, Penicillium digitatum partitivirus 1
  source 1..1620: mol_type = other DNA
atggaagattcgcctttcgaccccacccttctcgatgttgcactagaggagtcccatttggttgacgactccctactctctccgtctaatcggacgagtggagccagctatggcatcatcagtgagaagttttcttctcccggtcttcgcgagatcgctcgctacggtggatactccgtgtacaacggacaatctaacaccgatgcgtggattcggaccacattaaaagaatttgatcgttctgtctatgatgatatttatggatacactcggcgtccccagggcaccgaaggtatgtataaatcactgttaaaattctcagacggcaagaacagtttcacttcgctcaaccgtgtacaacgcaagagtatgatagacgctatcgctaaagcgaagaaagcgttcaagcttccataccaacgggaaccgcttgactggcatgaagttggtcgccacttcagacgtgatacgtctgctggtgtgtctttcatgggcagcaagaaaggtgacgtgatggaagagatctatcatgaagcgagatggcttggtcatcgtatgaaacagaacggtcgtgctaagttcaatccatccaagatgcggtttccaccgtgtcttgccgggcaacgaggaggcatgtcagaggcctctgaccctaagacccgtttagtttggatctaccctgcagagatgttagcgattgaaggattttacgctccggagatgtaccatgcttacatggatgatcccctttcgccgatgttgaacgggaagagttcacagcgtttgtataccgaatggacttgtggactacgagatggtgaaatgttgtacggtcttgatttttcaggatttgacacccgagtaccagcttggttaattcgagttgcgtttgatattctgcgacagaatatcagatgggattcgttccgaggtgagaaagtctcgaaacgtgacgcccagaagtggcgaaacgtgtgggacggtatggtgtggtacttcatcaacactccaattctgatgccagatggccggatgttccggaaatatcgaggtgttccctctggctcttggtttacccaaatgatcgacagtgttgtgaattacatccttgttgattacctcgctgcttgccagcagtgtgagattcgtgctttacgagtcttaggcgacgacagcgccttccgttcttgtgaccccttttctttggaggttgcaagccatgatgctgaatgtgtaaacatggtcttacaccctaaaaagtgtgagaagacaaaagatccgacagctttcaaactgttgggcacgacctatcgtaacggtaggccacaccgtgaaacgagtgagtggttcaaactcgctctgtatcccgaatcggttgtgccaaatcttcatgtgtcattcactcgacttatcggtctttggatcggcggagccatgttcgacagtgccttctgtcgcttcatggagtactatcagacgtgtttcgagtgtcctttggaaggctggttttccaaggatcaacgtcgatggctacaagttgtctacggtggaaaggcccctcggggttggaccacaaaacgcagtttattctggcgttcaatcttctatgtctacggataa

SEQ ID NO: 1600 - DNA, 1440 bp, Pennypacker partiti-like virus
  source 1..1440: mol_type = other DNA
atgccgttacgctacataggtcgtaccagggggtttccatcacgtacatttgatgaaatctaccccagcaaatacgttttacctttcttgaatggagttcctaacaagcgacgctcaccagttacgcaaaaattgataatcgatgatttaaaacagtttgataactcgagtgagaggcctgtcgaccctgttctagatttggccatcgcccatgcgacgaggaagtttatgttgccttctcctgttaagatgaagcacctaaacgacgtattcagaatggaaagcgacatttggaccaagagtcctggtctaccatggacgaactatggagttaaaactaagggacaaatcagagatgatcccgaacgagtgagagaagtgcgaaaattttggcactatgtaaaagctggagacaagatgtcttttcccgactgttgcgcttttgtacgttcacatgtatgtgaagttgacgagttcaaggtgagagccgtctggggataccccgccaccataacctttggtgaagcagtattcgccacgcctttgattgaggcatatcagagtttaccatctgataacactcctgtggcttatggacttgaaactgcaactggtggaatgcgcaggataaaagacagatttgtgaagaccggtctgtattacgctggacttgatttcagcaaattcgataagaccattccagcttggctaatccgtattgcctttgacatcttacgttgcaatatcgattttacatattaccaagatcatgggatagcggatgcacgccggatgatcgtgatgtatgaggccatcgttgattattttatcaatacacccgtccgtacagcgttggggctccgctataggaagaacagtggaatcgctagtggtagctatttcacccagttggttggatccatcgtcaactgcatacttttgtattacgcctgtctgcagacggtaggtcgcatgccgtttgatagcgttttcctgggtgatgattcattcctatctacaagcagacctcttagtataggagatattgccgcttgtttatctcgttttggagttgagataaacacgaagaagtctcaagtttcttcgagcatagacgaaatgaggttcctcgggtattgtataaatcacactctaccatacaaacccgccgatgatctactaacttctctcgcttttcctgaacgcccggatgaatcgtgggatgatgccgcctcacgcgcattaggcatctactacgcaaattttgggatgaacagtgacgtttcggagatatgctggaaaatggtaaatgtagcagaattcaacctcacctttggtcgcggatttgagcgaatgctaaaacatgttggttatactgatttagacaaacacctccccgcaccagttgaatttctgcgccgcctctctgttttctgttag

SEQ ID NO: 1601 - DNA, 1434 bp, Persimmon cryptic virus; identical to SEQ ID NO: 619
  source 1..1434: mol_type = other DNA

SEQ ID NO: 1602 - DNA, 1452 bp, Peterman partiti-like virus
  source 1..1452: mol_type = other DNA
atgggttatgctataagcgacgaagtgatgagacttcgcacctaccagtatcagaatcgtcgtgccaaagatactcttaagtttctgaactcagagactggagtcattgtggagggttctgttaaacgtgctttacttgaacagggtttccttttgaatgatcagagggataataaaagtcattttgagccacaaagttcgtttgacaacctgttaaagtatgcggtctatgttccatttaatcctgatcaggaagcttggaataaagcttactctgcgacagttcatgcttttgtgttacctatgaaccagtcgattaaacaggatatggatccgcggagcgttttcgcttcagtgaagggcgataagtccagtggagcgcctgagttttcttcaaagaaagacgtttctgagaaggattatgttaggatgctaaactggctccgtggttgtaaggctccagatccatgtgttgcctaccatagagtacagcacggtagtgacggtcctagattccgtctagtttggggatacccccaatctgtgactatgggagaagggacatttgctcgacccttgattgacatgtacaaggaacgcaggtcagtcatggcatttgggaaaactcgacataagttgagtgcgcaaatgactagcattttgaactctcatgcaaggtatggactagacatgtcccgttttgatgcttctattcatgcatcattgataaacatggcttttaatgtattatcaaagaattttgattggtatgagtcatgttatgaggattggcagaagattgaaaggtattttattcataccacaatactaatgcctgatggctatgtctatactaaacatcgtggagtaccttctggaagttacttcacacaaatggttgatagtgtcgtcaattattttgcgatccagtatgcgaattttcgattaactggaaagttgctaaatgagaataagatcctggtattaggtgacgattctatctttggttctgatgatgccatctctattaaagaatatgcaagagttcttttagagttaggtttgaccgtgaatcaagagaaaagttgtttagctcttgaacaccagcaagttgagtttcttggtcatatttggaagtcaggtcttccagatcgtaatccgattgatgtggctaagaggatggtgtacccagaaaatcatagtaagatcactgacggacgcgttaggatcaaaactagggtttatccttacgttactgatgctctatctgcacataaaataattactgagtatcagaaatgtccaaatggaattattcctatgtactctaacgtagacattgattggaaggaaggtctaactggttggcaggaattacaaacacttaacgataatgacttattgattaatcgagattgcctgatgcaagcatacgtaggtctgcttcgttaa

SEQ ID NO: 1603 - DNA, 855 bp, Phlebiopsis gigantea partitivirus 1
  source 1..855: mol_type = other DNA
ctccacttcctgcacttatggtacaataacatggccttcctctcaattgatggctttgcttactggcgcctttacgctggtgtaccctccggtcttttcaacacccagtaccttgattcattcattaatttgtacatcctcatcgatgccctcatcgaatctggctttactcatgaagaaatccgcgcactcgtactttttgtacttggcgacgataactctggcttcacactcattcctttctcaagactcgtctcttttgtcgcattcttagaatcttatgccctccgtcgatacaacatggttttatccaaaaccaaatccgtcctcaccaccctccgctcgaaaatcgaatctctcggttatcagtgcaactttggccgccccaaacgtgacatgtccaaacttgttgctcaactttgttatcccgaacatcgtatgaactacaaaaatatgtccgctcgcgccattggcatggcttacgcctcctgtggtaatgaccccactttctacgctttctgctacgacgtgttttgcatgttccttcctttctatgaatatgacgcacgaaccgatctgcaattagcccgaaaactacaactgaccgatcccgatcaattgctatttgaaaccaagcacctcaacttcccatcgttattcacgatccgaaaatgcttcgaccgctacgctggtcccctcgaatacgcaccaaaatggaattatgcccatttcatcaacggtccagatgtcgttcctccttccgcgaagacgatgcacgactacgaaatcgaacacgatctcaaagtccgtcaagcaccgaccttccgacaggctgatcttttgcctttggtttag

SEQ ID NO: 1604 - DNA, 1239 bp, Phoma matteuciicola partitivirus 1
  source 1..1239: mol_type = other DNA
atgtccgatttcaagctagatgcccctgttgttccccattggatcaaagacgttgatttagttaaatcaacttcgtccggttacccccattttgaaagaaaaggagatatccttgaaaccatacttcaagaaggacgcttccattttcatcacctcaagctatacgatctcaagcgatgccctttgcttccttgtaccgtatctacccgtggcggactctctgagtctaccgaccccaaaacacggcttgtgtggatgtaccccgccgctatgactgcctgtgaagcagtgtttgctcagcctcttattgacaagatttattctgagaaagcacatcttttgctcactggtgttgattctaaatatcgcattcaaaaatatctatcgctcatctctgatgatgctgatcgctgtggtattggaatggacttcaagtcattcgacacgctccgaagcaaccgacttatccgcgatgcttttgctgtacttaagcaaaacatcaagtttggttactactacgacaagatctctggccttcaaaaaggtcgctccggtgttgatgtccgtgctgagagagcatttgacaatatcgttgagtacttcatccatactccactcctcctacccaatggacgaatggttacaaaacatcatggtgtaccctccggctctcacttcacaaacttaatcgactccatcattgtacgcatccttatcaagacttttgcgtattacgaagacattccgatttacgaacttcggaccaatggagatgactccgccttctctgcctactctgattactcagttggcattctcgagaaagcagcagttttctttgacaaattcttcaagatgactgtttcagtcgcaaaatcctgcgttgctacggctccctccgcgatgcacgtctcaggtactgtctggaaaggtcttcgaccttcccgtcccacaactgaatggtttatgttggctgcgtactccgatacgtacattgacaaaccgtttgacagtttccaacgccttcttggtcttggaatagctggtggatttggtgacgctactttcacccgattcttccagtatttccagtctggctatgattgcagacaaggtccccggatcttaaactggaacaaactacgttggctagaacacgccttcaacataacagatttaccactgttgtacaagcaaggatcacgtacacacgtgagacttcgcctcctcgctgcttag

SEQ ID NO: 1605 - DNA, 1620 bp, Phomopsis asparagi partitivirus 1
  source 1..1620: mol_type = other DNA
atggaagattatactcaagatccaaccaatcactacgtcctagctaaggggtctcatttaattgacgcactccacctcagacctgcaaagtctgggtcaaccactagcgaagacattcttccaccttcttttgtagacgacaacttgcgtgagatcgcgaagtatggcggctactcaacttactcgtctaactctaacaccgatccctgggtcagagagacgttaaaactatgggacagagagatctacgaagatatctggggttacactcgtcgaccgcagggtaaccctggtatgtataccgctctgaagaagttcgctggtcctaaaaaccagtttggagatctgaaaccgtggcagaagaagtgtatgcgtaaatcgatttcaaaggcttttaaggcattcaagctgccttatcaacgagaacccctcgactggcatgatgtcggtcagttcctcaggcgtgatacgtctgccggctcaacctttatgggccagaagaagggtgacgtgatgcaagagatctaccatgaggccaggtggctcggacatcggatgaagcaagatgggaagagatctttcgatccaaccaggatgcggtttcccccgtgcctggcaggtcagcgtggcggaatgtctaccagagatgatccgaaaacgcgacttgtgtggatttaccctgcagagatgttggtagttgagggtttctacgcccctctaatgtatcgggactttatgaacgatcgcaattcaccaatgttgaacgggaagagtgcgcaacgcttgtttaccgagtggagcttgcactgtagggaaggagaaacactatatggtttggacttttcgtctttcgacacgaaagtaccggcgtggttgatcaaagttgcattctccgtgttacggcagaatatcaacttttcaacttttgagggtaaacctgtgggtaaacaggacgctcagaagtggagaaacgtctgggacgccatggtgtggtattttattaatactcctattctaatgcctgacggacgcatgttccgaaaattcaggggtgtaccttccggatcctggtggacgcagatgattgattcagttgtgaattacatactggtagattatctggcggcctgtcaggaggtagaaatccgaaacctgaaggtgttgggtgacgacagcgcgtgtcgagccaacgatcagttcaacctggaacaggctcaagtcgattgtgagcctgtggggatgatcttgaagcctgagaagtgcgagaagactgacgatccagccgacttcaaactcttaggcaccaaatatcgagatgggcatgtttatcgcccaactgaagagtggttcaaactcgctctctatcctgagtccagcgtgtttacgttggacatttcttttactaggctgatcggcctgtggttaggtggcgcaatgtgggatcggcgattctgtgagtttatggactactatcagagttgctatccatgtcctgaggaggggtggttctccaaagatcagaaacgttggctagaagtcatctattcaggcaaggcgccaagaggctggactactaaacgtagtctcttttggcgctcaatcttctatacctatggttag

SEQ ID NO: 1606 - DNA, 1557 bp, Phomopsis vexans partitivirus 1
  source 1..1557: mol_type = other DNA
atgaacgaggagtccttcattgatatgacttacgctggcctcacatactacacctccctcgctggacggtatgtagtcaaggcagcgaattcactggcctacttaggccgccacaatttcggaacaccgcagcgcgaagaatttaccacattcatcgatcccggcatcaaagaagctattcaaagctttcccggtgacatcgacctcgataaattcgacaacttctcccggagctactactcactccgcggacatatggacgccttatacaactttggctcctctcgacgcgcctccgaaccagtcaacgaccccgactggcttgcgacaaaagaacactgttttcagctgttcagcaccttccccatggtccacgcaatggactttgagactgaacttaaacaagttcctttcgagcccacttcctccgcaggaattggaatgcccggaaagaaaggtgacggcgacaaccacaaacgcgcagtacgacaagcatccgccaccgtctatcattgcatctcagacggcattcaacatgtcatcgataactcgacacccgacatggctttcgtccgcactcaattgacagatttgaccaaacaaacaaagatacgacacgtattcggtcaagcctttcaatacattctgcttgagggactctttgcataccctctcctgtctatgtttatgatgatcgattcaccatacttcctcggacgcgatccccgcaccgacgtggtgaaattcatcgaacgactgacaaccaccggtaaagacatgttctctaccgactggtcacgatttgatcaaaccgcagaacattgggaacttacttacgttttcgaactcttcgagtcgataatgaaaatacccaattcacacactcagactgcatgggagtttgttaaaatcttcttcattaacaggaagattgcagccccagatggaactctttggtccaaagctagaggtgtaccttcaggatcctactttactaacgtagctgatacatttatcaattacgcacggattcagtacatgtcaaagcgtattactggccaattcatcgacccagaccacattcgtctacttggagatgacgcactctttgcgatatctgcagcctacggaattaatccttaccgattatcacaagccatacccgatgacctccgcgacatttggatcttacgacccgacaaaatgtcatatggaagatcatctgacctggttgaattcctccaacgaactttgaaattcggagatcaacaccgagacaatgatcgagttgaacgactcgcactattcccggaatacccgatcactgacaaacgaatttcagcttatagagctagagctctatgggaggatggaaactacgagtccaacatgcttggatatgtcactgcctatttagagcataaatatggcacgcctgacaagaaggagattccccgatgggtacagacgtgggttgagaaacttaaattaccagttactcaagacaccgcacctgtttggaacaagatgaacgagaacacaagacgttcaatctag

SEQ ID NO: 1607 - DNA, 1608 bp, Phyllosticta citriasiana partitivirus 1
  source 1..1608: mol_type = other DNA
atgagcgatgtagttcttgacataccttctcccgaattgacagacgccctgcccgagggtgtcgcgtcccgcgagtctccgtccctaaggactcgaggtgactacgattttgtgagagaagcaacgctaaagcccggattatcagagatagccagatacggtggttacaaccagtatatggcgcccggcaacacggatccgtacgtccgtgaatctcttaaaacctttgaccgagatctgtatgatcagatttacggttttactcgtcgaccaactggcctaaagggcatgtacgaatcattggccaagtttggtgacgagcccctgcatttcgacagtctcaaccgccatcaaaagcggtgcatgacaaaagcgattgcaagagcgaggaaggcgttccgccttccgtataagcacgaaccccttgactgggatgaggtgggtcagcacctgcgccgtgatacggcagcgggagcaaccttcccaggcaagaagaagggtgatgtgcttcctgaaatctacacagaggccaggtggctcggacatcgcatgaagcagggtggaaaggggtccttcaaccccacaaaggtgagatttcctccggcgatggctacacagaggggtggcctgtcggagatagacgagccaaaaacgaggctcgcctggatctaccccgcggaaatgttggtcgtggaaggtttgtgggctccggtgatgtaccgtgagttcatgaaacttcccggctctccaatgttgaacgggaagagctcacagcggttgttttccgagtgggctgtaaacgtgaaagagggtgagaagttgtacggacttgacttcaagtccttcgacacgaaggtacccgcgtggttaatacgcgtggccttctccattctacaccagaacgtggcgtgggatacatggcgtggaaaacccgtgtctcccgtgaaccgtcagaaatggcggaacgtatgggatggaatggtgtggtacttcattaacaccccaatcctgatgccggacggtcgcatgttccgaaagcatcaaggtgtcccctctggaacctggtttacccagcttatcgacagtgtcgtgaattacatactcgtcgagtacatgacgacgtgccaagacgtcgaaccccaaaacctgaaagtgctgggagatgacagcgcttttaggtcaggattggacttttccatagaacgtgggaaagaggatgccattgcggtcggaatgaccttgagccctaagtcggaggtgacaaccgatccgacagagctcaagcttctagggacaacctatcgtaatggccatgctcatcgtcctacagacgagtggttcaaactcgctctgtatcctgaaaatccagtctctgagttaggagtgtcgcttactcggttggtgggtctgtggattggtggagcgatgtgggatactcgcttctctaagtacctagagtactaccagacctgctatgaatgtccgaagtatggaaacttctcaaaggatcagagacgatggttggaggtggtgcactccggaaaggcacccagaggctggaccacggggcggtccctcttctggcgttcatttttctacactctgtag

SEQ ID NO: 1608 - DNA, 2259 bp, Picoa juniperi partitivirus 1
  source 1..2259: mol_type = other DNA
atgctttcaatctcccagattgtacatctctatgtcctgctcaagttccaacacttccgccgtagaaatgaaacagcctctgaactgatattccccatcagaaacattctcttcgaatgggaatcacgacgatcacaagatcgcgactcccccctccgaatcctcgactattcaagtacgctcctcgcctacatcgatttacgcacatgccacaacattgcacacaatatcgaacacgagaaacaagcaatccttgactcctactctcaacgtgacgaatccttcgcactatatgagtctatagaagattccgacctccccgaagatcgctccccagctcccggcatccagcacgcaaaccttagatatcactccatcccatcctccgctatcaatgtagaagataaaattgataacttgaatgatttgcccacgcttacacaaacgccactaatgagcctaccagcacttagttctgaacaacccgatctctccggcctccccgcccatcccgacatcgctaatatcatcaacaactggttcccccaatactccgtccatctcgacacatactgtcgaccaccctccttcggaccccaagcctttcacgatttcaatcgcgaaaccccggacccagccccccccacgcctgaacgacacgaagcaataatgtccattgttagacaaaagtttaacatcaagcctttccgccccctgcacttcgcagacgccctagccgcagaaacgcccctcaatacatcagcttcatactactccaagttcgaccccgaaactagagttctcgcccgttattcatgcccttctcgatataaagataagcccacctccaaaggctactttataaacgtcatgctcaataagtttagacgcgaattccacaacatcaaatacgatggaatgcccttccccactgatcgctacgatcacgaaaccaatctagaactcctagaaacctggttcgccaagcatcccacgcagctgttcattcgcacccagatctcaaaacgagatccgtctgacccgaagaaaatacgtcccgtctacgcagtagatgaccgtttccttcatattgaaaagacactcacaaccccgcttctcgcccagatgcgcaacccccaatgttgcgtcgctcatggacttgaaacctttcgtggatccatgtcccttttggacaagatcgccctgtctttttcttgctttacatccctagactggtcacaatttgaccaacgccttccccgctatgtaatcatcgcatactacctcgacttcctcgcttccctaataatagtatctcacggatacatgcccacccgcaattaccccgacactattgcaagcctcccctccttcgcccaacgacaatacaacgtactgctctttctttgcatatggtatctgtctctcactttcctttcctatgatggttttgccttcattcgtaaacacggtggtgtcccctccggactcctgaacactcagtctctcgattcctttggtaacatgtacatcatcacggattgtctactcgaatttggctttacggaacaagattgtctccaaatgctattctgtgttatgggagatgacaacctcatctttctccagcacaatctgaatagagttacagagttcatggtcttcctcgaagactattgcactacacgccacggtatggtactatccttactaaaatgtgtatttggcaatttacgctctaaaatctcttttcttagctacgagaacaactatggccaccctactcgcccaatcggcaagctagttgcacaactcgcgttccccgaacgccccgtccctctcaaacgagaatggatacatgcagcccgcgcccttggattagcctatgcatcatgtggacaagaccctgtcttccaccttttatgcaaaatggtttacgagaaattccggccctccccgcccgtgcccactcatcacatcgacaaagttttcaagaaatggaaataccaacttcctgaattcatgattgaagatgtagagtacacgttccccgactttccaacgtcacaagaaatttacctattagtctctgactttcaaggtcacttttccgaaaatgacaaatggaacttcaacgtgttcaacgcaccgcccagtgacaaccttcccgactacgttacactaaaggactacatacagaccgattctgaaatgtccaaaaccgtaaacgaaatctggcatggtaagagatccttatag

SEQ ID NO: 1609 - DNA, 2247 bp, Picoa juniperi partitivirus 2
  source 1..2247: mol_type = other DNA
atgttatctatttcaaacatagtaacaatctttgttctcctccgattccaacaccgtcgccgatcaaaacaaacactcaatgttccctcatatcctgtccgaaacgtcacttacgaatggtacttacgcctcgcaataccccgaaacaccccgatatccgaaaccgcaattgactactcacgtacgctactcgcatacattgatctccacacatgttatcaactcatgataactctcgacgcccgaaaggccaaaattcttgaacgatatactcgtatcaacgaacccttcgctctctatcaaccgatagatccctcctcgtttccaaacgaccgcctcccctcccctggcctccgaatcctacccttcagatttcacagcatccccgctggatttaccctccctgaacaaggtatagaacaacccacctaccacgaccccaacagccccacccttgacctagacaccgatctttccggcgctccagcaaatcaagatatcgtcaaaataattcatgaatggttcccattctttgaacaattcgtcgataaatactgtcgccctccctcctatggtccccaagctttcattgacttcaacaagcccacagaactcatctccgatccttcaccggaacgcgaaaatgatattctcaccgtcattaatagcacttttgctatcaagccttaccgcccactacattttgtagatgcccaagccgcaatgactcccctctctacgtcagccgcatatcacgacaaattcgatcccgaaaccctcgttatatcacgaaaagcaacgccacagatatatgccgcccggcaaatgtcaaaaggccaccataataacgttatgctaaacactttccgtttagaactccataacatcaaagtcgaccttccttcacgtgatgatttgatacacttctttctcaaacatcccactcagctgttcattcgctcacagataagcctccgcgatccacaagaacccaagaaaatccgacccgtttacgccgtcgactctcgctttcttcatatcgaaaagatgcttacgactaactttctcgcgcaaatgcgcaatcctgaatgttgtgtccttcatggactcgaaaccttccgaggttcaatgcagtttatcgatcagatagctcattcattcaacttttatgtcagtctcgattggtcttccttcgaccaacgtctcccacttagcgctatcaagtgctactacacgcgagtcctcccctcccttctgattatctcagatggttactttccctcccgtggttatgaaaacaccgctcaacccattgatcactttgcacgcaaagtcttcaacatactctccttcctctatacttggtatagaaatatggtattcctatctttcgatggttacgcatatacccgccttaatggtggagtcccctccggactgctcaacacgcagtcacttgactcttttggtaatatgtatgtcctcgcagactgccttctcgaattcggatttactactacagagacacaagggatgatctttttcatacttggtgatgacaacatcttcttcgttaaccaacctcacgctcgaatgattgatttcatggatttccttgacacctatgctcttaaacgacatggaatggtactttctgtactcaagtcagtttactccaaactacgaactcaaatctcgatcctcggttacacgaacatgtacggcatgcctattcgccctctcggcaaattagtcgcccaactcgtttatcctgaacgacccgtacccgaagacaaacaatggatgcacgctgcccgcgcacttggcctagcctatgccgcctgtggacaagattcttctttccatcagctttgctttcacgtttatcgtcatttcaaacccgactacccagtcccgtcctctcaattcagaaaatggattaaattcaccgtccgcgaaattataaatttcgaaaccgacgccgaactaaccactttccccgaattcccgagtctccaagagattcgctcacttgtctcgacctatcatggtcccttctccgaaacagacaaatggcccgaaacgctcttcgaagacacgccgcctagcgacaaccttcatacatatactaccttagatgaatggctcagaacccaccctgagtttcaatttgactctgagaactatatgcctggttacgatgctccagacgcattgtccatcgctttttctaatcttcagatttaa

SEQ ID NO: 1610 - DNA, 1593 bp, Picoa juniperi partitivirus 3
  source 1..1593: mol_type = other DNA
atggaaatccttcgccataaattgaacatccgtccctaccgaccacttcatttcgccgacgctctcgcagccgaaacccctctctcgacttcctcttcttacttctcaaagtttgatcctaccgtccgtatctacgcaaagtattccaaccccacgcgttattccacaaagccgacctcaaaaggttactttgttaatgttatgctaaatcagttccgcactgaatatcaccacatcaaatatgatcaacttccctttcctcactccgatctatccgatgaacaacgtcaaacccttcttgacacatggttcgctaaacatccctcacagctctttatcagaacgcaaatctcaaaacgagacccctctgaaccaaagaaaatccgacccgtctacagtgttgatgacagattcctccatctcgagaaatctctattcaccccagcactagcacagatgcgcaacccccaatgttgcatcgcgcacggactcgaaacttttcgcggctcaatgtcaatacttgacaaaattgcactctgcttcacaagctatatctctctcgactggtcacaattcgaccaacgacttccttactacgttataatcgccttctttctcgattatcttccttctctacttataatctctaatggttatatgcccacgcacgactacccgtcaacagccccccccaaccccacagacttcgcatcccgcatcttcaacctctgttattttctaacaatatggtatctgaacatgcccttcctctcctatgatggatttgcctatgtccgtcaacatggtggtgtaccctctggcctcctgaacactcagttccttgattcctttggaaacatgtacattatcaccgactgtcttcttgagtttggattcaccagtaacgaatgccaagaaatgctcttctgcgtcttaggtgatgataacctcatctacctgaaacagaacataaatagagtcaccgactttatgctctttcttgaacgatactcactatcccgtcatggcatggtattatccgttctaaaaagtatgttttcttcactacgctccaagatcacctttcttagctacgagaaccactacggtaagcccacccgacctatcggcaaactagttgcacaactagcctatcctgaacgaatcgtcccatccgaacgatcatggatacatgccgcccgagccctcggcctcgcttacgccaatgttggacaagatccagtattccaccttctttgtaagatggtatatgaacgatttaagcccgacgaccccgttcccagttaccacattcagaaatggttcgcaaaatggcagcatatgcttccagaattcgaaaccacctccgaagaatacttcttccccgtcttcccgacgtgcgacaccatcgcacaaatgacgtcatactatcatggcccattctccgagacagacaaatggaatttcaacgtattcatggttccaccaagtgacaacctcaccgattatgttaccctcaaggactttatgctcaacgaccagcaaaagacccaacaagttaacagactttggcatggtaagagatccttttag

SEQ ID NO: 1611 - DNA, 1078 bp, Pinus sylvestris partitivirus NL-2005
  source 1..1078: mol_type = other DNA
attcagcggcaggttacggttacaccggtcgcaaaggcgatccaggtaatcacataagagcagtcaggacagcgaatgctactattcgggatttggcagatcaaatgatcagcaatcagtcacaaacagtttacaactggcttatgtatactacacccgatattgcatttactaggactcaactatcttaccttcctgataagatgaagatccgcaacgtttggggagcacccttccattcaatattgattgaaggacttacagcacaaccactcatggagtactttgcgcggcatcgtacattcttcaccatcggcgaagatcctaagattagggttccgcagattatttctgagcttgtacagaacagaacagtctattgcatagattggtccggctttgacgccagcgtatcagcagaaggaattgattttgcgttcagtctcataaagcgcatgttgacattcaactccgaactagacgagttatgctttgaagtttcaaggctcaatttcatccacaggaaattgatcgatccagagggcagaatactacttaaacatcgtggcataccatccggtagctactatactatgctagttgatactattatcaacgctcgacgcatattgtacatgtttcaccacttaactggtgaattaccaacagtacactgtcaaggagatgattcactaacaggagtccggccagactttcaagtctcgcgaggacacatcgcagctatctgtaaagagcaagcctgggatattaatccagacaagctcaagataagccgataccctgaagaactcgagtacttgggcagaaccagctcaggggattacaaccacagagaaaggcagaaggttatacgacttgcgatattcactgaatatccggttacttcaccacagatctcagcggctagagcacacgcactgtgcatcgacagcagctacagaatcccagaactagtccaagcatggaagtcgctcacacgacagtatggcgaagtccctccagaacaactggacaggagactaagaccgtacgatccaactaagttcttacgcgctta

SEQ ID NO: 1612 - DNA, 1434 bp, Pistacia cryptic virus
  source 1..1434: mol_type = other DNA
atggatcatccgtaccgtggaattcgcgaaggacttttagtactcgacgagatcccgatacgacgatcgcgcgatgagtttaagatcattgttgacccttacgctgctcaagctatacgagtcaaggtgccttacactctacgccaagagctagaaggatgggctagaagctactattcattagagaagcacattgaagctatcttaatgtataagagaccgaagctgcctcaaccttccgacgactgttggaataccaccaaacagttcgtactgacatacttcagaagacttccaaaagtcgagactttatcgtttaaagatttcgattcagtaaaatggattagttcttctgccgccggatatggttacattggccgaaaaggagacaatgataactaccaccgagccaagcggattgccatcacaatttcagaaagtctgaatcacgatgccaattatatgtcgcaagctatacaacagtctacgcctgatattgcgttcacccgaactcaactatcacttataaaggtgaagactaaagtgagaaacgtctggggagaagcatttcattatgttcttcttgaaggcttatttgccgaaccgctaataaatagatttaaagatctagaatctttttacttcattggaaaagatccacttttagcagtaccagcgttgattgaagagatattgtcagcgaaggactacgtctacatgtttgactggtccgggttcgacgcctcagtgcaagaatgggaaatccgattcgcctttgagtgtttggaatctatgctcatctttccgtcaacagttgagacccaaatatggcgttttgtcatagagttattcatatatcgaaagattgctggacccaatggggtattgtacttgaaaacccagggcataccttccggtagttgttttaccaatattgttggtagcatcacgaactttgttcgtatccaatatatgttcaagcggttgacgaaccgtttcgccgaggtttacacacacggtgacgattccctcgcaggagtcgatttaactcaatacgtgcctatggaacgattcagcgaagtatgcgatccattactttggtcgatcaataccgctaaatcagccgtttccagaagagatgaaaacatttcatttcttagcaggacagtccgtgagcgtcagaatacgcgagacgaattgacttgtttacgcatgttgatgtatcccgaatacaatgtgttatcaggagatatttccgccgttcgagcgaaatcaatctacctagatgccgggattaattcctattacttgtatgtaatttaccgatatctccgagagaggtacggattagcacaagtcctaccgtttgaatacagacgatgggatccgatagagtatgaagccagaaaaacttctgcttcagagattatgtaa

SEQ ID NO: 1613 - DNA, 1449 bp, Pittosporum cryptic virus-1
  source 1..1449: mol_type = other DNA
atggtgaaagacacactagtcggctataactacactagataccaaggtgatctagtgcggacggaccgacagcacccacatgtaattcgtagagaacatgctacaacttacattgatcaatttgcatttaagcaagttgaactagttgcccaactaattcccgaacaaatcttaactggatggtcgaggagctactacttaccagagaaacatctggaggctgtattacagtttggacaaccaaatattcctgttagcgccataaacgttgatgtctacagacaatcaatcgcagaggctgagaataggttaagtggccttcccactgtgagggcttatgatgtactgacccaactggatcaagtaccatttaagtcgtcatcggcggctggctatgattaccaaggcaggaaaggccaatatgatggtgaaaaccacaaaagggctattactcgagcaaaagccgtactatggtcagctatcgctgatgatggagaaggaatcgaacacgttatatcaacattcgttcctgacgtaggctatactcgcacacaactaacggatcttcttgaaaagactaaagtcagacaagtttggggtcgttgcttccattacattcttctcgaaggattagtagcaagcccgtttattaacgaacttatgaaacatgacacgtttattcatgcaggaaaagatcctatctttagcgtaccagagctattatctaatgtcgcaagaaattgcagatggctatatgcattagattggaaacaatttgacgcaacagttagcagatttgaaattaacactgctttcgacataattaagagaaagataatatttccgaactatgagacagaacaagcttttgaaatcacaaggcaattgttcatccataagaaggtggcagcaccggacggatatatttactggtcgcataaaggcattccatctggaagttactacacttcagtcgttggatcaatcgtaaactttctaaggattgactacttatggaggaccttaacaggacacccacctaaggagttacatacattaggagatgactccctatcgggcgacgatatactgatcgaaccacaaaggattgctgaagaagctgaaaagattggctggcacttcaatccagagaagactgaatactccagaataccggaacacgttacatttctaggtagaacatacataggagggttaaacaaaagagatttaactaaatgtttacgtttacttgtatatccagagtatcctgtagattcaggtagaatatcagcttatagagctaactctattgcgcaagacgcaggcggactaagcgacgtcatcaatagagtagctaacaagctacagcgaacgtatggaatcgcttccgaagaagaagtaccatcgcattttaagcgctatgtaatagaaaacataggaatttaa

SEQ ID NO: 1614 - DNA, 1728 bp, Plasmopara viticola lesion associated Partiti-like 1
  source 1..1728: mol_type = other DNA
atgacactcaagagcttagctaagggtaggaggttcaggctttctgaccaaatagcaaatattgacaaatacgctcgcgatgctctctatagagtatcaattgatcatggcttatcaaaagattttcttcatgtttgtaaggaatggcatcggccaatcccagatatccacagtttaaggactgcggttttaggatacggatgtcaggatccagacagatgtttagaccctgtttatttcagtattcttaaacaaacaatggatgagttcaggccatccaagaagttaatcccccacacattaggtgcggttgtagacattagtgactttccccgaactcggtcacctggttttccttggaatacacaaggttacaaaactaaggaagaggttcttcggagcccggaagcacgaggatacatccagcgcgagtgggatagtataggtcgtggagtaggttggaagctaccagacgttcaggcgtttcacagaacggtagtttcacctaaatcgaagcaaaaggttcgcctcacttggggctttcctgtcgacgtgattgcggaagaagccagatggttttatccaatgtggtcacatgtgaaaagtgtctcccaaacagcagggacatgttatggtgttggacttgaaattggtcttggcggtattcagtacctacaggatcagatggtcaccaccggatacaatgcactctgcggtgactttagtcagtttgattcgaccgttccaggatggttgataagagacgttttcgctcatatgtcggattggttcgattttgagcatgttattgatagagaaggaatcgtttgggatgtcaacccaaacaagacggtacgacgatggaaagcgatggtatcgtattttctatcgtgtagtatacgtttacctaatggtgaacgttttaaaaagtcgaagggcgtgccctctggttcgatgtttactaatttcatcgatactatatgcaatgcggttgccacccgttatgcatgtatgcaagccagcggacgtttaccgctccgagactactactatggcgacgacagttgcgttatgattaaagggcttaacgtgaccaaattcgccgacgtacttgagtccaccttcggtttgaagctgaatatggacaagactatctatacgtgtaatccacggaatatccattggctcggatattatgcaagagaaggtctccctaaacgggaacttgactttcttcttgcttcttcggtttacccggagaaaaagatagtacatccagtcgagtcatgtgcacggttgcttggtcaactgtactcgactatggatccccagttagccagtattttctggttagcgcttgaacacatcaggaagcgcgcaaatctgacggtccaggctgtcgaacagttcgcgaagatgaacatttctaaggcattaaagtttttaactgtcttgggactaagtccatccgagcttgaactacctattgcgtctcccgatccgttcagtcttacgggactccggattaacaacgtcctccctcgatctccatccaaacgtttgaatggtatgtttgatcgacatcttcttactgaagtaggtgcacccgagagttatgctaatactcacattcgtcgtatgaacttttatttattttatgattattacggtttttgtcgtgacgaagaaacgagttggagcagactctacacacggtctctactctga

SEQ ID NO: 1615 - DNA, 1719 bp, Plasmopara viticola lesion associated Partiti-like 2
  source 1..1719: mol_type = other DNA
atggcacctttacggatgttgaaacgagtttctcgttttccatctcgcaccgactcctatttcgacactttttcatatgaagccctttccgcggtctccggatcagcaggaaagtctctcattgagagcatcaagtctacgtggcatagaccctccggggataatgcgacgcttgaaaagaacctccttctctacggagaagaagtaccctcccgttgcaacgacggtgattacttggcaattctcaagcacacaattgacgagatcaggcctactgaaaagattgttccacttacgcttggagcctctcgactgcacccgaacacaacacgggtcacgtcacccggcttcccctgggtcaaccagggatatgcaacaaaaggcgacgtctacgacgacgcgtccgctgttggcaaaattcacatggcgtgggacatgattggtcgaggaatcgcctggcaattgcctgactcaatggcttatcacagagttgttgcgtcaccgcaaaccaaaacaaagatacgtcccgtctggggactaccttgcgaggtcatccttgaagaatcgcgctacttccatcctctcttttcagagttgaaggaaatcgcgaacgaacgtgatgccttttatggcatcggcatggaaacgtacctttccggtcactctcacttggcccggaattttgatacgtctactgtcaagtacaacatgtctggagatttcacaaacttcgacgctcgtgtacccgcatggctcatccgagatgtgttcgctcacatatcatcttggtttgatttcagccgtgtgcaagattcagaaggcaaagtatggaacgtcaaaaccgcacaaacttgccgacgttggaagtcgatgatttcatatttcatcaacaccaagatcagaacaccaactggtcttcgcttccagaagtcgcaaggcgtaccatcaggatcgatttggaccaacctcatcgatactatctgcaatgccgtcatgaccagagtcgctcttaggcgtctttcttctcttccagagaaggattactactatggagatgactcgagtgtgttcctccgggaacccattgatctagacgctttcgccgatatcctgaaaaccacatttggcgccgtcctatctacagaaaagacaatgcttaccaacaaccctgaaaacattcactggttggggtattatcacagaaccactggcccgcgcaggtcgctggacttcattgtcgcttcttcgctgttcccagatagagaggtttcacatcctcttcattctgcggcccgtctcctcggacaactgtattccatcatggatccagtccagtccgttaccttcttcgacgcgatacgatacttgcaaaacaagtacaacattgaaacctggttagttgagagctacgtctcagctctttcttccaaggctttcaagtatctgcaaactctcggactctcaacgaacgacatctccctaccgaacatagggattgatccgttcggtgataggttcatcttggaccttcttccgaaaccgtcagctcgcaacttctttcgacgaagagatcataatcttccgaagtatgcatttgtcgctgaagcgtaccaaaaccgcgaactccgttcaccacgatttaaagattttcaccttttcactcaaaccttttcctggtataacgaattcgccgaggatcgacactatttcacagattag

SEQ ID NO: 1616 - DNA, 1620 bp, Plasmopara viticola lesion associated Partitivirus 1
  source 1..1620: mol_type = other DNA
atggaagattttactctagaacccacccaacactacgttctcgctaaggggtcccatttaattgacgcactccaccttcgtcccgcaaagacagggtcaaccacgagcgaggatgttttgtcttccaatttcatggatcccaacctgtgcgaaatcgcaaaatatggggggtacgcaacgtactcgtctaactctaacaccgatccttatgttagagagactttaaaactgttttctcgagacatctacgaggaagtccgtggttttactcgcagaccggaaggaactccaggcatgtacaaagccttagctaagttcaccggggcgaaaaacacattctcttctctctccccatctcaacaggcagcgatgcgccgttctatcggcaaggcaaagcgtgctttcaagttaccgatcaagcgtgaaccgttagattggcacgaggtaggtcagttcctcaggcgtgatacgtctgcgggctccaccttcatgggtgaaaagaagggcgacgtgatggaagaaatctatcatgaagctaggtggctaggtcaccggatgaaacaggacgggaaagatcgtttcaatccaaccaagatgcggtttcccccgtgcttggcaggtcagcgtggcggaatgtcagagcgtgacgatccgaaaacgcggcttgtgtggatctaccccgcagagatgttggtagtggagggcttctacgccccccttatgtatcgtgactttatgtcggatcccaattcaccaatgctcaacgggaagagcgcgcagcgtttgtataccgaatggtgctgcaagcttagggaaggcgaaactctatacggactcgacttctcctcttttgatacgaaggtgccagcttggctaatccgtgtcgcatttgatattctcaggcaaaacatcaattttgaaaccttcgatggaaagcctgtctcgaagaatgatgcgcaaaagtggagaaatgtttgggatggtatggtgtggtatttcattaatacgcctattcttatgcctgacggacgtatgttccgaaaattcaggggtgtaccttccgggtcctggtggactcagatgattgattcggtggtgaaccacatcttagtcgattatctcgcagactgccagcaagtagagatccgaaacctgagggtgctcggcgatgacagtgcgttccgagccaacgaccagttcgatctggaagttgcccagcacgattgcgagccaacgggaatgatactaaagccagagaagtgcgacaagacgtgtgatccatgtcaattcaaactactgggtaccagataccgtgacggccacgtgtttcgagacacgtcggagtggttcaagctcgccctttatcctgagtcttctgtcttatcagtggatatatcaataactagactcatcggcctgtggttaggaggagcgatggctgaccgtgtattctgtcagttcatggagctgttccaatcaagttatccgtgtcctgaggaggggtggttctccaaagatcagaaacggtggcttgaggttatctattcaggcaaagcgccaagaggttggactaccaagaagagtctcttttggcgatcaatcttttacttttacgggtaa

SEQ ID NO: 1617 - DNA, 1326 bp, Plasmopara viticola lesion associated Partitivirus 10
  source 1..1326: mol_type = other DNA
atgtacaccgccctaaacaagttctctggtgagcgtagcacattccgtgatctgtctccatctcaacaagcgtcaatgcgtcgttcgatcgcaaaggcgaagaaggctttcaagttaccatacaagcgtgaaccgcttgattggcatgaagtgggccaattcctcaggcgtgatacgtctgcaggatccactttcatgggcgccaagaaaggtgactgcatggaagaaatctaccatgaagcgagatggttaggacacagaatgaaacagggtggaaaaagaagtttcaacccatcgaagatgcggttccctccgtgtcttgcaggccagcgtggcggcatgtcagagattgatgagccgaaaacgcgcctggtttgggtatacccagcagagatgttagttgtcgaaggattctacgctcctttgatgtatcgcgactttatgaacgatccactatcaccgatgctaaatggaaaaagtgcgcagcggttgtacaccgaatggtgctgcaaactaagggaaggggagacactgtacggcatcgacttttcgtcatttgacacgaaagtacctgcgtggctgattcgtgtggcatttgatattctgaggcagaacatcgaattttcgaccttcgaggggaaacccgttgacaagggagacgcacagaaatggcgaaacgtttgggatgctatggtgtggtatttcattaacactcccatcttaatgccggacggacgtatgttccgaaaataccggggtgtaccctctggatcttggtggacgcagatgatcgactcagtagtgaaccacatacttatcgattatctggctgactgccagcaagtagagatccaaaacctgagggttctgggcgacgacagtgcgttcagagctaacgaccagtttgacctggaagtggcaaaactagattgcgtgccaactggaatgataatcaaacctgagaagtgcgaaagaacaaaggacccatccgagttcaaactattaggtacgagatatcgtgacggtcgcgtacatcgcgacaccagtgagtggttcaagctcgcactctatccggaatcaagcgtgtatacgcttgaagtttcgttcacaaggcttgtaggcctgtggattggcggggcaatgtgggataaagtcttttgtgaattcatggacttttaccagacctgctatcctgttcctgacgaggggtggttctcaaaggatcaaaagagatggcttgaagtcgtcttttcaggcaaagcaccgcgaggatggactacaaagcgtagtctattctggcgatcaatcttctacgcatttggctag

SEQ ID NO: 1618 - DNA, 1164 bp, Plasmopara viticola lesion associated Partitivirus 2
  source 1..1164: mol_type = other DNA
atgctattaagtgaaatccccaacgtttatcagcgggcgttggcccttgaacgtcgaatccgactcaaggaactttaccctgatcagatcgtaccgtaccttgctcgacaagagtttgcgggagcgatcgctggtcctaacggaccacgaagtgtggcaccgagtgttaccacttcttttactgctaagatgcctctggatcaataccctgattcaaagtatgtctatgagcccaagaataccatgatttatattggtaagatggacaagtaccctatgtcttcttctgttccgaagtttgacccttggttccgtcatgtcttgaagctcagggctcctcaagtcgttcgtgacttagaggaaacttatgttcgtgatccttgtacccctgatcgcgtcatgaagcacttcgctttgtttgaccgttattggaagaaccttccaaccggcaaacacatggctgaagccaaatccattttgactgaaatgtttgctcctgtcggaaaagtcgaacctatcgacttcaatttcgccggctggcacgagatacttcctcatctcgacatgacatcgtcacctggacttcctcttcgtagagagttccccactcagggtgaatgtctcggtcatatttatgacaaaacgaaacggctcaaccattttgcaaaatttctgcctcctcacgctgtacgtgctcctccttgcatgatcggactccgtcctggtctcgttaagaaggaagaacttgatgaaaagatcaaggctcgtggagtttgggcttacccggcagaggtcaaagttatggagatgcgctatgttgttcctcttctttcaaggttttccaccttgtttggaaagatcccctacccagtaggtcgcaacatgacaaaggctcttcctttctttattgaccacatccttcaaggcaagaagtttggactggtaactgatatcagcaaacttgacacttgcgtcggccccgactacattgattgggctttcgacttccttagggatatgtttgatttcggaattactaagtcagctgaaacacgcagctcgaatgttttcgatttcttacacttttatttcaaacgcacacctatcctcctcccgtctggccaattggtcaagaaggttggtggtgttccgtccggatctggg

SEQ ID NO: 1619 - DNA, 1572 bp, Plasmopara viticola lesion associated Partitivirus 3
  source 1..1572: mol_type = other DNA
atggcagattcttttgtcgatgacgatgaaacatttggtaacgacaacccgtccgtgtgggactatcctttccggtacatcaccgaaacaaggaggtttccagactacaaacgtggtattcttcgccaaacgcagcgatacgatcctttcgtagatgttgcactcaaacacttcgatcccgaactcagggaggagatcaaaggctacacccggtcacctggtgacgagtgggaccttgcagacaagttcaggaaatatgacaccgctactctcagtcatcctactggcaacgcaagattcaccgccgcatacgaccaagccgtcaaaacagtgatgaaagagctcaaactcttcgatcctgttgctccccactggattctagacattgacctcgtcaagtctacttcttccggatatcctcactttcaacgcaaaggagatatctttgaccaactacgtcaagagggacgcttccacttccaccatttaaagctcttcgatcttcatcgatgcccgcttcttccatgtgttgcttcaacacgaggaggtctagctgaggcttccgatcccaagactcgctttgtgtggatgtatcctgccgcaatgaccgcctgtgaggcagtcttcgctcaaccactgattgacaagttatacagtgaaaaagcagactacttcttaacaggagttgattccaaattccgaattcaaaagttcatgtcactactctccgatgaggaaggcacttcaggaattggtcttgactttaagtcatttgacacctttcgcaatacacgactcattcgtgatgcgtttgcagtgttgcgccaaaatatcaaatttggctactactacgacaaagtccatggattacaaaaaggacgctccggagtagacgttcgtgccgagaaagcattcgacaacatcattgaatattttattcatacaccaatgcttcttcccaatggccgctgtgttaccaaacatcacggtgtaccatctggctcgcacttcacgaacctgattgactcaatcgtcaatcgaattctgattacaactttcgctttgtactcagacattcccatcaagaatctcaagaccaatggagatgactcagcattcacagcttcaatctcttactcaacaggtatacttgagaaagcagctcgattcttcgactacttctttggaatgaccgtttcagtcgcaaaatcatgtgtcgccacaggcccatctgatatgcacgtttctggaaccacctggtcgcaacttcgaccacaccgccctaccaccgaatggtttatgttggccgcgtacgcagacacgtacattgcccgcccgttcgatagcttccaacgccttttaggcctcggaattgctggaggattcggggacgctaaatacgtccaattctttagttacttccagtctggctacgattgcagacacggtcctaaccttctcaactggaacaaacttcgttggttggaacacgctttcaacataaccgagttaccgcttgtttacaagcagggttcgcgcacccatacgcgccttcgcctcctggctacttaa

SEQ ID NO: 1620 - DNA, 1572 bp, Plasmopara viticola lesion associated Partitivirus 4
  source 1..1572: mol_type = other DNA
atgtctttcgacgacatagataacgatgacactttcggcgaagagaatcccatcgtctgggactatccacttcggtatgcgacagagacacgtcgttaccctgattacaagcgtggaatcttacgccaaacgcaacgctacgatccatacgtagacgtcgcactgaaatcttttgatcctgaacttcgtgagaggattaaaggctacactcgtactcctggagatgaatacgatttgcacggaaaatttctcaaatatgatcgagcacctttgctctttccttcttccgacaaacgattcgttgctagttaccaacttgcactccaacagacaatgaaggagtttaaactcgatgcgcctatcattcctcactggattaaggatgttgacttagtaaagtcaacctcttctggataccctcactttcaacgaaaaggtgacattctggaccaaattcttcaagaagggcgatttcattttcatcacctcaagctctacgatctacatcggtgcccgcttttaccttgcaccatgtcaactcgtggtggactgtctgaacagacaaatcccaagactcggcttgtgtggatgtaccccgccgccatgactgcttgcgaagcagtgttcgctcaacctctgattgacaaactatattctcagaaggctgatctgttcttgactggcgtcgattctaaattccggattcaaaaatatctgtccttgctctccgacgagaaggatactgccggagttggacttgatttcaagtctttcgatacactgcgttccaacttcatcatccgtgatgctttcgctgtacttaagcaaaacatcaaatttggttactactatgacaagatcactggtacccaacgaggacgttctggagtagctgaacgaacggagaaagcatttgacaacatcgttgaatattttattcacacaccgatgctttttccaaatggtcgctgtgttaccaaacacactggcgtaccatcaggttcacactttacgaacctaattgactcaatcatcaatcgcattctcattaagactttcggtttttacgagatgctcaacatccgttccttgcggaccaatggagatgactctgcttttacaatgttagaagagcgcaccaccggtgtacttcacaaagcagctgttttctttgacaagtttttcaagatgactgtttcggtcgacaaatcatgcgttgcattggcaccatccgaaatgcatgtttcaggaacaacctggagggctctgaagcctactcgaccaaccgacgaatggtttatgcttgctgcgtattccgagacctacattcaatcaccgtttgattcttttcaacggttgttaggattggggatagccggaggatttcaagatgcgcactttgtgcaattcttttcctattttcaatcaggctacgattgccgtaatggcccaaacctgctcaactggaagaaacttcgatggctcgaattcgctttcaacataaccgatttgccgaatgtgtataagcaaggctcaaaaactgctttacgccttcgcatcctcgccgcttag

SEQ ID NO: 1621 - DNA, 2007 bp, Plasmopara viticola lesion associated Partitivirus 5
  source 1..2007: mol_type = other DNA
atgtctaccctcattatcccgcaagataccatcgtatcaacattcgatgaagcagttgctgcagaaagcaacttacgcgttgatgaagttccagaagattacctcgagcgatttgtacatccatcagaacccgagaactttgaattctatacacaaagaacgacaacagttcctcaaaaccgattaccaaaacccggaatcgaaattcttgataatttacaatatcacacaaactcaaaggatgatctttacaaaaatcaaccagactctggcccccggccaatggttggtgtaacgaacataataagagaattctttcctcaatacttagaggacctaagaatttggtgtcgacctaaatcgtcaaataactcaatttttaacgattttaatcacgagcaacacccggtaaaaccatttactgagagtagagctacaagactccttcctcttattgaccatttccttggaattcaaccatttgatatcgttcactactgtgacacgagattctacccttggaaactttcaactcgggcagattattttcataatcactcccgcgctaggaagaaacatgctattcagtctcaccctgattatgcaacaggtccaacaaagaaatcctattttataaatgcacacttgttctatgatagatcaactgtacataatattaagaattatggatttccttttaaaccaactggcgatgaccgccgtgatcaagatttacttgatctttggttcaaaaagattccaacagagctacttgttagaacccatatctcaaagagagataaactaaaagtacgtcctgtttataacgcacccatgatatacattcgtttagaatgtatgttattctatccattactcgctcaggctcgaaaacgagactgctgcattatgtatggattagagacaattagaggtggaatgatagaacttgaaaagattgcaaacaagttttcatcctttctacttattgattggtctcgatttgaccatcttgcaccattcatgatatccacatttttctttaaaaagtggcttccaactaaaattttagttgaccacggttatgctgaaattaacaactatgacgaacatattcattccttcactgctcaagcagcgaaacatggagttaatattaaatccaaagtttattcagacagaccagacataccagtattcgcgaataaggttaataacttaattaactttttagaaacttggtatagaaaaatggttttcgtgacaccagacggatttgcttaccgtcgcactcaagctggcgttccatcaggaatcttaatgactcagttcattgattccttcatcaatcttactgtcctactagacggaatgattgaatttggattcacagatgaagagattagagactttacagtctatataatgggagatgacaacgtcattttcacattactaactctccaaaaactaattgaatttttcgattggtttgtagcttataccttacatcgttttggtatggttattaacatctcaaagtccgccgttacttccatccgtcgaaagattgaagtacttggctatactaacaactatggtctacctagtagatcaatttcaaaattagttggacaattagcctaccctgaaagacatgttactgacgttgacatgtgtatgcgagccattggctttgcttatgcaagttgcggacagaacagatctttccactccttatgcgataaggtatttaagcattattttgctaaagtatcaatttcaggtatagttgacctttctaccatgaaaggagatttaccaggaatgtttttcgcttatcctgatgtggcagaccacattagacttgaccactttcccaccattgaagaagtacgtagtgttctttctcaatttagtggttatttaaaagaaacccctctctgggattattcttattttaaaaataagcctaatccagaaagagaaaataaaataacactagcg

SEQ ID NO: 1622 - DNA, 1719 bp, Plasmopara viticola lesion associated Partitivirus 6
  source 1..1719: mol_type = other DNA
atggaacaacttattcaatcaatgaataaattaaccataaactcgaactacgttttcattggagacactgaccaccgtcaactccctgtgcagacaaaccaattcgctttggaagcacacaagaaaacagtattgttctcaatggctaaacatctcttcacgcacgaagtggaacaagtactttcattacgtcgacccgaccctaatgacattaatctcgtctactcagacttctttgctggtgacatccctccccactctatagaaaaagacgacatttactatcaagcacttaaccacgtaacggacctattctgtccgccccaacctgtgcgccctacacacatcttcgatgtgcgttaccactatccacatgaacgctcatctaatgccgaagcacctttctcgaccgaaaagttctttcgtgacaaggctccccgccctccacctggcactaagataaatctgttctcagttggtaacatgtatgatgttattttcgactggacacgtcatttccaccataaaatcaagcaaggtgcaaactatcatgattatctctggtatatccaattgcataatcgcacttcacttgttggaccttccgacccggacaaaatccgctctgtatctggttttccacgaccacaaaacattgcatggatcatgttcctttggccctatttatcatggttgaaaactcgtgacccacgaacttcccctatgttatggaatttcgaaaccaatcttggtggctggttcagactgaactatctactatacaccggtttccacacccgtacaatcattactctagataagagtaagtttgacaaattctatttcttcgccattcaagatgatatcgataacatgatcgagaatttcctcgacttaaaccatggctacataccaactactgactatcctgacacctctaaggactggacgcttaataaagcaaaacgactacgtcgcttacttcattggctatactatagctttcgcgcctgcccaactgtcacacctcacggtcaaatgtttcgtcgccgctttgctggaatgccatctggcgttttcccagtacaactattcgatactatctactttgcaattacagacactgatgtccttctacgcatgggaatctcccctgctcaaatacgcctaagaaaaggccaaggagatgacattattactcaactctatatttgcataccacccaacgcccacgacagcttcttgtctacgtactcacgtattgacaacgaacgattcggatctactattagtgtaacgaaatcagaaatgcgtaactcacctcaaggtgcacacgtattaggttatcgcaataagaacggtttacccgtccgcgataccgttgatctcattggctcactttaccacgctaaagcaagacaaatcaacgaatcaatcagcatgtcgatcgcagttggcatagctcacgcttccttaatgcatgataaacgcgtttacgcgatatgtaaggatgtgtactattactatgctaaccaaggctttacaatgaaccagaactggttacgccgtttctacgcgtataccgggatctctctctctcacgtcacggattttccaacccctgacgagatatgtaacaaactctttgacttttcttttgaacccagaaagcaaacagttgattacttcccaagatcccactttctttctgagttctaa

SEQ ID NO: 1623 - DNA, 2136 bp, Plasmopara viticola lesion associated Partitivirus 7
  source 1..2136: mol_type = other DNA
atgagcaaatcaaatcctatccgtgactacctatccgaaagaaaccttcgcattaaaaccgaatggaaactatttcaacagtcccaaaatagcgacgaatcactttcacagttgacatccgactccgatcttaaacgcctatatcatggctcaagacattacttaactgaacaagagaaatcacatgccctacaatctcaattcgatcaaatacttcacgatctacaaattaagaacaaagacaaacacgaaccatttgagtattttactccacgtttactacccgtcccttctaaccgagaaccttcccctggcattactctcctcccgcttcaatatcatgttggtcaaaccgtcaccacttctgaacacttaaccgaacaaggttttccccttgatccgattctaacaacacttttgactactaagtatccacaatatttagcctacactcaaaaatactgtcgtccacttggaaccactgaatctactttcgctgattttaacaagccacaaatacatatatcaccatcacttccagaacgcaaggaacgcatactgaaacatattttcagatatttagacgctaaaccttatctacccgttcactttgttgatacattatatgcaggactcccaatctctactggaactggctaccacaatcgtcattcctacaagattaaagctcacgctcgatattcacacccgaaagaatatgcatctaaacctacttctaaaggctacttcttaaacgcttttctcgaacaggctcgaacaatagttcaccgcattaaattatctggtcttccattcccctggacccttccttctaatccaacagaccaagacttcacagctctacactctagactgaactctttcatcaacgaatacccgacactacttttcacacgtaaccacatttctgaccgagatggaaaacttaaacaacgccccgtttacgctgctgatgaacttttcatcaccatcgaaactatgttaacgtttccacttctagtacaagcacgccattttcaatgctgcattatgtacggtctcgaaactatacgaggatcaaatgtatatttggacgctttagcccaactattcagatctttcttcactatagactggtcagcctatgatcaatctctcccccgccctgtaacttcatgttactacgaagacttcctccctcgcctgattgttataaatcaagcttatcaaccaacgtatgaataccccacgtatcccgaccttactgaacacgacatgtacagccgaatgagaaaccttctctcattccttcattgctggtacaataatatgacattcctctctcaagatggatatgcctatcgtcgaacctatgctggtgtaccctctggtatactcaacactcagtacctagattcatttggcaatctttatttaattattgatgcttttattgaatttaatttaacagattacgaaatcgaagaaatcctcctatttataatgggtgatgacaactccggcttcacacactggccaatcacaagattagaacagttcttaacttttctaacataccacgccaaacaaagatggaatatgaatatttcactttcaaaatccgttatcacaacacaacgacaaaacattgagactctgtcttataaatgtaattttggtaaaccactccgcccccttccaaaattagtcgctcaactatgttatcccgaacatggcatgatctacaaattcatgtcctatcgcgctatcggcattgcctacgcagcctgcgctatggatgttacttttcacaatttttgtaaggatgtttattacacataccttccatatcaagctgaattaactcctgatattatcggaaacataatcaaatttctgcctggacagttcaaaatgctagactcttatgtcgaaacaattgatctatcccgcttcccaactctccaagatgttgcaactacaatttccaaatggcaaggacctctctccttctcaccaaaatggaatttcgcacattttatcaacgcgcccgatacaacgctacctcatcccaagactatgacacagtatgaagaagaatataatataattgtttcttctcctcctatgctatag

SEQ ID NO: 1624 - DNA, 1620 bp, Plasmopara viticola lesion associated Partitivirus 8
  source 1..1620: mol_type = other DNA
atggatccattcttttcgcaagacgtcgacagcctctctgactcgagttcctttggtgttcaaccagggacagagtccctctttgacccatccaagcggacggcaaaaagacacaaagaagcaggttccttttacaatggatacgctctcaaagagattgctcggtatggtggatactccacgtactcccccccaggatttactgactcctgggtccgaacatgtttgaagcgtttcgatttcagtctttaccgtagtttacacgggtttaccagacgtggttctggtcttgagggcatgtacaaatctttgtacaagttcgatggacctacccaccggtattcagacctaaatcatcaacagcaacgcgcaatgaatcgcgcagtagccagggctcgaaaggcctttgagctacctcacaagaatcaacccctcgactggcatgagattggacagcacatgcgagtcgatacttccgcagggatatcgtttcccggaaagaagaaaggagaggtgatgcgtgagatttacgatgctgcaagatggttgggtcaccgtgtgaagcactccggaaagctcggatttaatccgaaacgtgtgcagtttcctccggccatggctggccagcgaggaggcatgtcacaaagagacgatccaaagaccaggctcgtctgggtttatcccgcagaaatgttggtgttggaaggccattacgctcccatgttgtacagacaatacatggagcgacctgacacacctcttctaactggcaaatctgctcagcgtctctacgctgagtggctctgtaaatacagagacggcgaggttctccacggcctcgatttttcttcgttcgacactaccgtccccagctacctaattcacgctgcatttgacataatgcacggcaacattgattgggagcactgggatggaaagaaagttggacagagagaccgacaaaagtggaaaaacgtatgggacgcatgcaagtggtattttataaatactcctatcatgatgccggatggcagaatgtttaggaagagccacggtgtgcctagcggttcttggttcacccaaatcgttgactccatcgttaactacatcctggttgaatatttggcagagtgccaggatttgcacatacaatctctgcgcgtgctcggtgatgactcaggtttccgagccccccaccctcttgatttagttcaagctcagcgcgacgctgatggggtgggcatgacactaaaacctgaaaagtgcgacaccaccactgatcccgttgagttcaagctcctcggtactacctacagagatggtcacgcgttccgccccgatgaggagtggttcaagctcgcgctttaccccgagaacataccacctgatgtttctacatcaatcacaaggttggtaggcctatggataggcggggccatgtggtctgcaacattttgcaagttctttgagttctaccagacttgctatccgtgcccccagagcggaatgttcagtaaggatactcgacgttggctcgagataatccacggctctaagagcccaagagggtggagttcgtcacactccctcttctggagatcaatattctacacattgtag

SEQ ID NO: 1625 - DNA, 1827 bp, Plasmopara viticola lesion associated Partitivirus 9
  source 1..1827: mol_type = other DNA
atgaagaatctcaacttcctccgtacactggagatctcttccttcacttctcacgttcgtgagaaattcgctgagtatcaaccgtttcgccttgactggttagtcaatcgagctaaacgatactttagtgaaaatgaagtagagaaagcgctgtctaacagacgctccgagcataacgaagaggcattgatcaacgacttcaaatccttcgaacaaccgtaccatcctattcctaaggacggacattaccgaagagctgtcgcttgtgtcactaaacttttcgaccctggacgtgtgttgctaccggtcacattccctgacctgcgctactacccttggaaattgaaaccgaacgctgaagccccctggaacattccagacttcactttcaccccaacattccgtgatcttgatgacgaatccgagaatccaaaactcgaagagcgactatctcgcctttcaaactggatatctgagagaactgtcacaataagacaatacttgaataccaagtacatcatcggcatgattgacaatcaattccctaagtttcacaacttatacaacgagatttttcaatataatcgtactcttgttcaccaaatcaaagaaggacacccagccttctggaagaacggcgttcccagaacttactactggacaacattacacgcacgttcacacgttgttggtaaagacgagcctgacaaaatcagagcagtctttggcgttacgaagttactactgatgatcgaaaacatgttcatctggccacttcaagctacttacctaaacgacccagacaaaggcagactcctttggggacgagagatgatccgtggtggttggaaaaaactattcgctgagatccacaacagtggaaatccaaatacatatttatcgctagattggtcacaatttgacaagcgacttctgttcgagttaatcgacgaagttcattcaatctggagatcgtattttgacttctcgcgctatcaaccgacctccttctatccgaatgcaaaccctcgacgtcccgaacgtcttgagcggctatggcaatggatgtgttattcaattaaacacactccgattcgacttcccaacaatgaattgtggagttggaattacaatggcttctcttctggttttcaacaaacccagttgatggattcattcgccaacatgattatgatactcacttcgctttcagctcttggaatcaacattgataacaagaatttctggatacgcgtacaaggtgacgactcattaatcgcattctatgaacagatttacttaatctacggacccaactttctaacatcacttggagacacagcaatgtactactttaatgctaaattaagtgtcaagaaatcgcaacttagcgatcgactgcacggcatgtcagtactcagcttcttcaatgattttggactccccgcccgcacagatgaggacctactcaggcacctcttcttccccgagcgaaaccaagacctagcccgcactgcttcggcagctttaggactagcgtatgcagccagtggttgcagcccagcctttcacaatctttgtgaatatatctggactaaattggtaaaggagaaaggtttctcgcccaacgaggaatcgatccaatggttagaacgcgctggtgtattcaccgaacttgacgtgaaagcaatgctttcagaggagtttccaacactcttggaacttcgagctcaagtctggtttcacacagctagatcagttcaagaacgagaacggctatggcctactgaacctggacctcgcggaagatttttcttcctaccctag

SEQ ID NO: 1626 - DNA, 1486 bp, Poaceae Liege partitivirus 1
  source 1..1486: mol_type = other DNA
atgcagcgaaactgcacacttaacggttacgacttcaaggactacgagaacgaattctcagcccttccggggtcgcatccacacgtcatccgcagagagcaaggggtgacatatcatgacgagtatgctttacgcatattgagagcaagatacccagagtactacacccagtttatagaaggctggtccagaagttactatttaggtagtaagcatatggagtccatcagacagtatgactcgcccaaccattcagctcaggacatagatgtaccagcataccgcacagcgtacgcccatgtcaagaataggttacgtagccttccaattgtgagggcatttgacgtcttaacagaacttgatctcatcaggtttgagtcaacctccgcagcaggctacgactatgttggtccgaaaggtcccatagacggtgaaaaccacaaaagagctatcaggcgcgcgaaggcaaccctctggtcatcatacgacccagaagaaggcatcgatcatatcatcaagcagatggtaccagacgtcggatacactcgtacccaattagcagacatcaatgagaagactaaggtcagaggagtttggggcagagcatttcattatatattacttgaaggcaccacagcaaacccactacttacagcgctcgttaacaacgagacgttcattcacattgggcctgatccaacaataagcgttcccaatttactatcacaagccagcaaacactgtgattggttatacgcaatcgactggagcaacttcgacgctacagtaaatcgattcgaaatccatgcagcatttgatctgattaaagagcatctcgagtttccaaatccggaaacagagcaagcatttgaaatcagtagacagttattcattcataagaagatagccgcaccagatggccacatttattggacgcataagggtatcccttccgggagttattacacatcaatgattggttcaatcattaacatgctacgtattatgtacatatggcaagttatcatgcagcgaacacctcagttttgtatagtacaaggagacgattcaatcagcggagacgcagagttagttgatcccttactattcaagagggctgctgaaccagcaggatgggtactacacccaaagaagacggagatttcaagatatccagaaggagtaacattccttggacgaaccagttcaggaggcatgaacatccgcgatttaaagcgatgtctcaggctactcattttacctgaatatcctgttccgtcgggagcaatttcagctttcagagcaaactcaatagcacaagatgcaggaggaagaagcgccgtgttaaacgcgatcgctcgagctttggagcaagagtacggcagagcatttcattatatattacttgaaggcaccacagcaaacccactacttacagcgctcgttaacaacgagacgttcattcacattgggcctgatccaacaa

SEQ ID NO: 1627 - DNA, 1820 bp, Poaceae Liege partitivirus 10
  source 1..1820: mol_type = other DNA
atggactaccttgtctccgcattcaaccgaatcactcactggtttgtcaaagaaaccaatttcgagctcgtagggaactactccctgcctcctggcctactccgtgtcaatgatgttgctatccgcaatcacaaacagacactactacatgccttcaacacctacctcttcgatgatgagatcaaacttgtcactgttgattaccgccggtctgatattgactatccctcaatactccaagacttcttcaatggcgacgttgaaaatttcgaaataccttttgacgaacacgtcgaatacggtttacgctgcatggctgacgccttccgtccgccaagaccttgccggcccgctcacatcctagatgtgaagcaccactacccatacaaatggaacgtcaactcagaaccaccattctcaacagacgaatacttcctatctcaacgtatgacctttggcaagttcattcaaatgcacgaatacgaacacatcgataaagaagatttcttcagacgtcatccgaataccgaatcccacgatatgctcactaccatcgtcccaccaaaatttggctaccaaaagtcatcgattttctcctggacacgacgctggcaccacatcatcaaagatggattccgcgaatctaccggactcaccacgaatggatatttctacaatcgctttatctttcccatgctactacacaccaaaactgctatcgtcaaaaagaacgatcccaacaagatgcgcaccatctggggcgcctccaaaccttggatcattgctgaaacaatgctctactgggaatacatcgcttggattaaatccaaccctggcaaaacaccaatgctatggggtttcgaaacacacacaggtggctggttccgactgaatcatctactctactgtggtctcatcaaacgctcattcctaacactagactggtcacgcttcgacaaacgagcgtacttccctctattacgtagaatcatgtacacagcccgtactttcctcacattcgatgaaggctacgtcccgacatatgcagcacccgcacatccccaatggaatcacgcgaaaaccatcagacttgaacgtctctggttgtggacactcgaaaaccttttcgaagcaccgatcatcttacccgatggccggatgtaccgccgccacttcgccggaataccttctggcttattcacaacccaactactcgattcctggtacaactacaccatgctcgctaccattctaagcgcacttggcttcgaccctaaacactgtattatcaaagtacaaggtgacgactcgatcattaaactatctgccctgatacctgaagagtcacaccaaagctttatggacgctatcgtccgtctcgctgactactacttcaaatcagttgtcaatgtcaacaagtccgaagtcgctaacaccctcaatggccgtgaagtattatcgtaccgcaatcacaatggtctccctcaccgtgatgaaatcgccatgcttgctcaattctaccataccaaagctcgcgacccaacacccgagatcacaatggctcaagccataggatttgcatacgctagctgtggcaaccaccaccgcgtactaagcgtgctcaaggatgtctatctctactataaggacttaggctacacaccaaaccgagcaggtctctccctcacattcggagaatctcctgaccttgttttgcctgaaataccacttgatcattttcccaccaccattctcaacagacgaatacttcctatctcaacgtatgacctttggcaagttcattcaaatgcacgaatacg

SEQ ID NO: 1628 - DNA, 1788 bp, Poaceae Liege partitivirus 11
  source 1..1788: mol_type = other DNA
atggactaccttgtctccgcactcaaccgcatctcgcattggtttctaaagcaaaccaatttcgaactcgtgggaacctactctcttcctcccggcattctccgtactaatgacgttgctatcgcaaatcataagaaaactctggaacatgcatttcacaaatatctctacgatcgtgaaattgattacatcactaaggaacaccgccgctctgagatcaattatgactctatactcatagacttcttctctggcgatgtcgaacacttcgaaataccttttgaccaaaacgtcgaatacggtctacactgcatggccgacgcctttcgtccgccacgaccttgccgccctgcccacatcttagatgtgaagcaccactacccctataaatggaacgtcaacgcagaacctcctttctcaactgacccatttttcctcaactcaagggatacttttggcgagttcatccgcaaacatgagtacgaatacatcgataaggaagacttcttccgtcgtcatccaaaccaagaatcacatgaatttcttaaaacagtcgttccacctaagttcggctatcttaaatctgtggtcttctcctggactagacgctggcaccacatcatcaaagatgggttcaccgacaaaacggacctccgcgattcaggttacttctataaccgtttcatcttccccatgctactacacactaaaactgctattgttaaaaaggacgaccctgataagatgcgaaccatctggggtgcctccaaaccatggatcatcgctgaaacgatgctctactgggaatacattgcttggattaaactaaaccccggcgtcacaccgatgctttggggctttgaaaccttcacaggtggttggttcagattgaatcacaccctcttctgtggactaattcgcaaatccttcctcactttagactggtcacgcttcgacaaacgagcgtatttcccgctaattttgaaaatcatgcaaatcacacgtactttcctcaccttcgacgaaggctacgttccaacatatgcagcacctacccacgttcagtggaacgaagaaaaatccaaacgacttgaccgtctatggatgtggacactcgaaaatcttttcgaagcaccgatcatcttacctgatggacggatgtacaaacgccacttcgccggaatcccctctggcctcttcaccactcaactactggattcatggtacaactacactatgctcgcaaccattctgagcgctcttggcttcgaacccaaacactgtataatcaaggttcaaggcgatgactcgatcatccgcctcaacctcttaatacctagcgacaagcaccagtccttcatggacgcacttgtcgaaaaggccttatactacttcaacgctatcatcaacgtaaagaagtccgaagttagaaactcacttaatggatgtgaagttctgtcgtaccgtaaccacaatgggttaccacatcgtgacgagatactcatgctcgcacaattctaccacaccaaagctagggatcctacccctgaaataaccatggctcaagccattggttttgcttacgctagctgcggcaaccaccgccgtgtcttacacgtgctagaagatgtttacaactactacaaggacctcggttacacaccaaaccgagctggacttacgcttacatttggcgaatctccagacttatctttaccagatatgccacttgaccactttccgaccactgctgagatcagacgctacctagtctgctcccgctatgcc

SEQ ID NO: 1629 - DNA, 2148 bp, Poaceae Liege partitivirus 13
  source 1..2148: mol_type = other DNA
atggttctcacaactatccgcgattacttacacgaagctcaacttcgcattaagaaagaatggcaaacataccaatctaatcacgaaacatctggttactccgcagaccgtcctactgactacgatctccgccgatactacgattccgctcgaaactacgacgcagaatttcatcgcaccactgaatacgaacacaatttcctgcaaacttatgaacgttatactaacgcaaacatacaacgcaacgaacccttcgaattctatcgaaatctcaccgacaatgaactccccaaagaccgtcaccctcaacctggtctcacagttcttcctttccgctaccacactggacaaatcgtccatactaccgatgaccttcctgaatctggatttactctccatcctctcatttcacatttacttgaacgcaaatggtatcactataaacagtataccgataaatattgccgcccacttggtacaaccaacgcgacatttaacgacttcaaccgtgaacaaaaacacatcgccccaatcgatcctgaccggaaaaacactgtcctcaaactggtaactaccatacttaatggacttccgtatctacctctacactttgtagacactcgattctgtaacactcccaagtcaactggcactggatacttccaacgcttctcgacattcttcagaacccacgcttactacgcacgaaatcccatctacgcactacgacccacttcaaaaggctatttcttcaatacgctctatgaatactcacgcacctggatgcatcacatcaaggaatatggctaccctttcgtaccctctgacaaccaacaagataatattcgacaacttcgaatcttctttcagaaacatgtaacaatgctatttactcgcaaccacatctcagaccgagacggaaaccttaaacaacgtcctgtttacgcagctgatgacttcctcatcatgtgtgaattaatgactacattccctctccatgtaatggcccgatatccaattaatggtatcaaatccgccatcatgtttagttttgaaacaatacgtggctctaaccactatcttgactccctagccaagaattttcaatccttctttaccatcgactggtcctcatttgatcaacgcgtaccccgcataatcactgaccttttctttactgactatctccgcaacttgataataatcaaccacggataccaacccacttacgagtaccccacttaccccgatctcacagaacatgatctctaccatcgcatgtctaacttactccacttcatgcacacttggtacaacaatatggtttacgtcaccgctgacggattcgcatatctaagatcaacagcaggtgtcccctctggtattctaaatacccagtatctcgactcctttgctaatgcttttctactcacttatggacttctagaatatggatactctccatctcaaattctcgaaatcaccttcttcatactaggagatgataactctggcttcactcactttagccaccatgaactcactgaatttctcgactttttcgaaaaatttgcattactccgcttcaacatggttctctcaaagaccaaatctgtaataacaatcatgcgcaataagattgaaactctctcttatacatgtaattttggcaaaccacgccgccccttaggcaaactggtcgcccaactctgctatccagagcacggcccaaaagacaaatacatgtccgctcgcgccataggcatagcctatgcagccgctggaatggatcccgaattccatgaattctgttatgatgtatatcataccttccttccttacgccgcacctattaatgatcacacacttgatatggcacagaaacatctacccggatatttcagagtcctcgactctctttcacatgaaatccccttcgaccacttccccacaatagaagaagtactacacaagtactcctcctggcaaggctacctggctccacaaccaaaatggaacacagcacatttcatcaatctacctcatatcatcccacccgacgcaaaaacaatgactgactatgaacttgaacgcaacattcaacgtcccacagttcttgattgcttccaagacttcactctcgtaatc

SEQ ID NO: 1630 - DNA, 1443 bp, Poaceae Liege partitivirus 14
  source 1..1443: mol_type = other DNA
atgtcgaagtgcacacacaacatcacagactacgagtttgtcaactttcgaggagatttagaagatcttcaccagacacactcagagcaggtcaacagggaagaagaagttatacaccatgacgaatttgccttagcagaactacaagctattaaaccagagctttacgatcaattcgtgaacaactggtcacgcagctggtacactaagaagcatcacatggatactattctgaactatgctcacaaagacattcctgtcgaacttaccgatatgaacaaatggatcgagtccattcgtatcgtaagagataggttacgtagccttccaaaagtgagggcgttatcagtcaaacacgaacttgatcaagtcaagtacgtacaacagtcctcagctggctacggttaccacggcgtcaaaggtcccatcaaaggtctcaatcatatgagagccatcaaacgggccttagctacgttatactccgcaacagcagaagacggagaaggcattgaacacgctatacgcgagtcagttcctgacgttggctatacacgcacacagcttacagatcttacagagaagacgaaagtcagaagtgtatggggcagagcctttcattacatcttactagaaggaacagcagctagaccattgttagaagcaattgcagcaactgatcacttcatcgtcatcggacaggatccgatcgtaagcgtaccacagattttatcacgcacgcgagaacattcacgatggcttacagctattgattggagttcattcgacgcaaccgttaatcggtttgaaatcaatacagccttcaatctgatcaaggagatgatccaatttccagatttagatacagaaatggcatttgaactcagtcggcaactcttcattcacaagaagatcgcagcaccagacggcaaaatctactggtcacataaaggaataccttcaggcagttactacactacacttgtcggatcaatcgttaatcgattaagaatagaatatctttggcgaatcaaattcaaccaaagtccatcatcatgctatgtattaggagacgactcactaatcggctttgatcaattcttcaaaccagacgaaatgcaagaactagtttcacatttaggatggtttatcaattccaacaagacagagtgctcaacccacgttggaggagtcagttttctaggcagaacaagtcgcggtcattacaacgaacgtgatcttaagaaatgcttaagactactcatcttaccggagtacccagtaacatccggagcaatctcagcttttcgagctcaatccattgcgcaagacgcaggaggttcaggtgaatacctaaaccgcatcgcagagcggcttaaacggcatcatggcatcgcagaacaagaagcgatacccaaatactttaggaagtatcaatttctgtaa

SEQ ID NO: 1631 - DNA, 1404 bp, Poaceae Liege partitivirus 15
  source 1..1404: mol_type = other DNA
atggctggtggactcgcactagttggatcaggttctcggcgcagagcaagagaagagttccaaatcattcacgacagatggtcgtatgagatggtgaaagagtacgcctcaccaggtgatatgcaagagatagatggctgggccagatctttctacactttagaaggtcacctcgcttcaattcgagcatatgacaaaccactgcttcctcaaccggacgactcagtctggaccgacgttaaagcggagatgttgaacatgttctcaaactttgagaccgtcatcagcttaccgtttgaaacaggccttgactccgttcgttttgagtcatcctcagcagccggccacggttactcaggaaagaagggtgaacacgacaaccttaaaagagcaaaaggcattgcaaacgcagcaatccgcacatatgcggaaatgatcgagcagcatggcatcaactacgccaacgacgacatcactagcaacagcacgccagatatcgctctcactcggacgcaactcgcaaagttgccatccattaaggttaggaatgtctttggagaggcatttcattacatactgatcgaggggctttcagcttttcctcttttggaggtgttcaaacgaggagataccttttacttcattggtaaggatcccacacttgaggtgccctacatgcttgaaagcatggagcgacgcacacagtggtactctattgtagattggagcaatttcgacgcatcagttcaaaactgggagatcgaccacgctttcaactgtctacggcagatgatccacttcccttcaagactatcagagcttagctttgagtattcaatcgtgcttttcaagaagcgcaagatactcagcccagacgggcagctatatatgcgagattctggaattccttccggaagttacttcaccaacatggttggcagtatcatcaattacgcgcgtatcaacttcatcatgaagaagctcaactacccagtgttgaagatcatcactcaaggtgacgattctatcacattcattggaaacactcagagaccagaccccagcgagttcagcagaattagcgagaggtataactggactgtaaaacctgagaaatgcatcatcacagactccccagacgacgtggtatttcttggaagaagctccctgcaccgttacaacgtgcgagatcgcctcaaagcgcttaggcttctgtgttatccagagttcgaggttgaagaccccaaaatctcaacagcgagggcacatgcgatacaacgtgacgcaggctacaatgatcctatctttgataccatttactgtgcactttatcaaatgtacggtgaagcacaagacgtgccttaccatttattaccttactttgaacgagatttgttcatgtaa

SEQ ID NO: 1632 - DNA, 1739 bp, Poaceae Liege partitivirus 3
  source 1..1739: mol_type = other DNA
atgcgaaacactgtccagataggctttaagccttccctagctcgtgagcttcgaggtaatccagatcctggatcaaaccctgcttatggcaagacagtcgactacgctctacgaagacacttatccgaagatgagttcgaaacggttgttaatcgatttagaagatctccttggaacaacgaagcgctcaatgccgacattgaaaagctcgattgcgaggaacatcacgtcattaaagacgagcactactatcgtgccatcgaaaagacccgaaccctattttcaccagataagaagctcaaaccagtacattttgctgatttgagacattacccttggcagttatcatcaaacattggtgccccattcgccacaagcgaacactggcagtcctatgttaatgaaaaatattctggaaatttcaccgactcctttagtcgtgatttattcaaagaagcccatggtacatcactcgacccagtgatgatcgatcgacgtatgacaaagcgaaatctctataatgagatgtttctcatcaacaggaaaaacattcatctaattaaagatggctggaccacaaactcatcaggccacgacctgaagtattggaatactgcatttgcacgacaacatctagtcgaagaaaacgacccagataaagtgcgcctcgtattcggtgctccctctactctgctaatggcagaattaatgtttatatggccccttcaagttagtttactagctagaggctctgaatctcccatgctctggggttttgaaaccctaactggaggttggtcccgactatataactgggctacaactgtagacccccagtttaatacagtcttaacgctcgattggagccgcttcgataaagaagcgagacacaccgtgattcgtgacattcactcaatgatcatgcgcccgatgtttgacttcaacaatggctaccaaccaacgatcttttaccctgaaactcctgacacagacccacaacgccttgagaacctttggaattggatgacggacgcagtcctcaccataccactattacttcccgatggcaaattgctacgatttcaacattctggtatttactctggatatttccagacacagattcttgattctatgtacaactgcgtcatgatttacactatcctatcaaaaatgggattcgacatagatcgtattcatgtcaaggtgcaaggagacgactctttagtcctgctcccccactcatacattgcacttcgtgacacattcctgcccttcttctctagcacagcgctaaagtactttggatccaccgttaatattaagaaaagcgagatccttccatcattagaaaatgctgaagtactaaggtaccgtaaccacggaaccatgccctttagagatgaactccaactcttagcaatgctaaggcaccctgaacgcacagcttcactccagtcattaatggctagatgtatcggtgtcgcatacgctaattgtggaacccacacccgtgttcaccaaatttgcgaggatatttatagttacctagcatctgcaggctttacgcctgacccgcttggtttacctggtggtcttcgatataaacagaactacgttcctagttatacgcaaattgatctagatcattttccgtctttctacgaaactatctgtcatctccaagacccggcccgcgaaatccttacaggaaagcactggccgtgctcccactttat

SEQ ID NO: 1633 - DNA, 1377 bp, Poaceae Liege partitivirus 4
  source 1..1377: mol_type = other DNA
atggcaggcaacaacaacaacatcaacggccacaacttcagagactttgagcgagagttttcgtttctgtattcaggccacccatttgtcatccgaagagagcaagaggtgacatatcatgacgagtacgcactcaaagtgcttcagtcaagataccccgagtactacgaccaattcattaaaggatggtcacgcagcttctaccaaggcgcagcgcacatgaaatcaatcatgcagtatgactcacccaaccattcagctcaagacataaacgacgactcgtaccaacgagcagtcacacatgtcgtagaacggttaagtagccttcctattgtgagggcattcgacgtcaaaacagaacttgatttaattaagttcgagtcgtcctccgcagcaggctacaactactccggccacaaaggcgaagtagatggtttaaaccacaacaaagctatccggcaagcgaaggctattctttgggcttcttacaacccagcagagggcatcgaccacgtcatcagagagatgacgccagacgttggatacacccgcacccaattggcagatatcaatgaaaagacgaaagtcagaggagtttggggcagagcattccattatatattactggagggcacatccgcaaatccacttttgaacgcgttcactaccgttccaacgttcgttcacattggacctgatccaacaataagtgtaccaatattactatcaaacacatcgaaagagtgcaaatggctatacgccgtagattggagttcatttgacgcatcagtcaacagatttgaaatccatgcagcttttgatatattgaaaacgcatatagactttccaaaccaggaaacagaacaagcgtttgagattagcaggcagctcttcatccacaagaagatcgcagcaccagatggtaacgtttactggtcacacaagggaatcccttccgggagttattacacatcactagttggttcaatcgtcaacatgttacgcataacatacttatggtatgagttacttggacgaccaccgaaagtcagcttcgtacaaggagatgattcactgaatggcgatgacgagaagatcaacccgatcaacctcgcacgcatagcagcgccagcaggatggaagttacacccagataagacggaaatctcgagatatccagagggagtcacattcctcggcagaacaagctcaggaggcatgaacatacgcgaccttaagcgttgtctcaggctactgattctaccagagtatcccgtaccgtcgggagcaatttcagcttatcgagctcattcaatcgcacaagatgcaggaggcagaagtgtcatccttaatgagatcgctagagcattaggacgc

SEQ ID NO: 1634 - DNA, 1437 bp, Poaceae Liege partitivirus 5
  source 1..1437: mol_type = other DNA
atggatcactccttccggaacatccgcgatggcctcacagtcattggcgaagtccgcacacgaggatcacgagacgagtttaacctcatcgtcgacccatatgctctcgaagctatcaaggccgtcgcaaaggcacccgtcttatttgctctacaaggctggtccagaagctactacaccctcgacgcccacgtcaaggctattgaagcgtacaacttaccaaagttgcctgaacctaccgacactgtttggaatcaaactaaacagtatgtttcagatttattcaagcggttcaataccgttgaatgttcaagctacaaggatttcgattctgtcaaatggatcgcttcctcttctgctggttatggatatacaggtcacaaaggtgatcatgaaaactatcgaatagccaagcgcactgccgtcacaatcagtgagatgctgaaccacaatccgaactatgtcgctgaagccgtagaacagtctacacccgacgtcgcttttacgcgaacacaactgtgtcaagtcaaggtgaagacaaaagtcagaaacgtctggggagaagcatttcattatgttctgctcgagggcttatttgcccaaccgcttgttgaatacttcatgacaatagattcattctatttcattggaagagatccactgtttgcggtccctgcactgattgaagacctactttccaagaaagactatatctacatgtttgactggactgcgttcgacgcgtccgttcaagaatgggagatccgatttgcttttcagctattggagtctatcctgaagtttccttcaaccgtggaatcccacatctggcactttattattgagctcttcatatacaggaagattgccgctcctaacggaacgttgtaccttaaaactcagggtatcccgtctggcagttgcttcaccaatatcattggaagcatcgtgaactttgttcgcctccagtatatgttcaagaagatgacgaaccagtttgtcatcgcctacacccacggcgacgattctcttgtcggcattgactcagctcagtttgtacacttcaagcaacttgaagctattgcagcccagttcaactggaacctcagcgctgctaaatcaagtttctctcgaagagccgaaggcacgactttcttatcaagaaccgttcgtgaaggtcaaaatacccgtgaagacctcacctgcctacggatgctactattcccggaattccctgttcaatcaggagcgctaagcgcgctccgcgccaagagtatctttcatgatgctggctctaactcggagactctccttgccgtctatctttatctgaagacgaagtatggagtagcagatgacttgcctgatgaattcaaggcttggaatcttatcgaatatgaggcccgaaaggtttcgtactccacctatgtaatgtaa

SEQ ID NO: 1635 - DNA, 1761 bp, Poaceae Liege partitivirus 6
  source 1..1761: mol_type = other DNA
atgaagaacatcgaaaagcttggctctgtgcctagcttggcaaaaccgattcgtggtaatgttgaccctctggccaacctcaactacggaaagattattgaccatgccctccagcgtttcttaacgcatgaagaattcctcaaagtcaccactggctacagaagatccccatggagcgaatccgctctagacactgatctcgaaaagttagactgtgactcttttgacgttttgaaggactgccactactatgcagccatcgaacacaccaggaagctctttcagcctaaagcgctattacggcctgttcactttgccgaccttcgtttgtacccgtggaaattatccaccagcgttggcgcaccttttgcgaccagcaaggaatggaatcagtacgtgaatgaaaaattcgacaaaggctttaccaagccatattatcgtgatctattcgccgaagcacacggagaaagtctcctaccgacaatgattgatagaagaatgacaaaacgaaatttatataatgaaatgtttttcatcaacagaaagaatatacacatgataaaggatggaaaaaccaccaatgaacatggacatgatctacggtattggaataccgcgttcgctcgacaacacttagttctagccgaggacgaagataaagtccgtttagtttttggtgcaccatcgactttgcttatggccgaactcacgttcatctggccactacaagcgagtctgctcgatcgaggcgaagaatcgcctttgctctggggctacgaaaccaccactggtggctggtcccgcatttaccgatgggcacacgccgttatgccgcgttacaactttgttgcaactctcgattggaaacgattcgaccgagaagcacgccataccgtcatatcagatatacattcactcatcatgagacctctattcgatttctctcatggttatcatcccacaatctactacccagattcatccgaagccgatcctacccgaatcgaaaacctttggaattggatgacgaatgctactcttaccacaccattgatgttacctaatggagatttgttaaaatttaatcactctggaatttattccggatattttcaaacccagatattggactcaatgtacaattgtgttatgatctttaccatcttatcaaagatgggtttcgacctcgaaaaggttgctattaaagtacaaggagatgattcaatcttccttatgccacatgatttcaactatttaaaggggtcatttctacagttcttctcgtattatgcgagaacatattttggctcaactcttaacatggagaagagcgagatcctaccttcactagaaggtgcggagatcctgaagtatcgaaaccacggcactatgccgtatcgcgacgaactccagcttttggctatgctgagacatcctgaaaggaccgtctctctcagtgccttaatggcacgcagtattggcatcgcttacgctaactgtggaaattccactcgagtataccacatttgcgaggacatctacaacttcttattgaaaggaggctatagccctgacccgcatggtttaccaggtggtcttcgctatagacaggactacgttccaagctcagcggaagtagacattagtcacttcccaacttatcatgaaacagtccgccttttgcaagagccgtcccgtccgctcctaacggagcaacattggccggtacagcactttctcggtgtccccggaaagtcttag

SEQ ID NO: 1636 - DNA, 1888 bp, Poaceae Liege partitivirus 7
  source 1..1888: mol_type = other DNA
atgttgtggtgtgttgaacagaaaattctcccgagccctggcagcccccacccgttcggtcttacaaagctaaagaattctcgtcccaacagaattttctgttcaacacaccacaacatgcgaaacactgtgcaagtaggctttaagcctagcttagcccgtgagcttagaggtaatccagatcctggatctaaccctgcttatggcaacacagttgatcatgccctacgccagcatcttaacgatgatgagttcgacacagttgttaatcgatttagacgatccccgtggaacgtcgatgcactcaatgatgacattgaaaagctcgactgcgaggaacaccaagtcataaaagacgagcactattaccgtgccatcgagaaaacacgtcaactcttcactcctgaaaagaagctcaagccagtacattttgctgacttgcgacactacccatggcaactatcctctaatattggagccccttttgcgacaagcgaaaaatggcaaaaatatgtgagcgataaattttctggaactttcgacgacgcttttagtcgcgacttattctatgaagcccaccaggtatcacttgaacccaagatgatcgatcgacgtatgacaaaacgaaatctctataatgagatgtttctcatcaacaggaagaacatccatctaattaaagatgggaagaccaccactgcaacaggccacaacctgaagtattggaatactgcgtttgcgcgccaacatctagtcgaagaaaacgacccagataaagtgcgcctagtattcggtgctccatcgactctgcttatggcagaactcatgttcatatggcccttacaggttagtttactagcccgaggtccgcaatctccactactatggggttatgaaaccctaactggaggttggtcccgactgtacaattgggctacatccgtagaccctagatttggtacagttttaactcttgactggagccgcttcgataaagaagcaagacacaccgttattcgagacattcactctctgattatgcggcccatgttcgacttcacaaatggatatcaacccacgatcttctacccagaaactcctgacacagacccccgacgtcttgagaacctttggaattggatgacggattccgtcctcaccattcctcttctcctcccagacggccgagaactacaatttcaacattctggtatctactctggatattttcagactcagatcctagattcaatgtataattgtgtcatgatcttcacaatcctatctaaaatgggatttgacttagatcgagtccacgtcaaagtacaaggtgatgattcgatagttttactaccgcaacattacaccttgctcaaggacacattcctaccattcttctctgactatgcacgtcagtacttcggatccactgtcaacgacaagaaaagcgaaatcctcccttcattggaaggagctgaggttctaaggtaccgcaaccacggtactatgccctacagagatgaactccaactcttagctatgctgagacaccctgaacgcacatcatcactaccatcactaatggcgagatgcgtcggagtagcttatgctaattgtggaacccacccccgtgttcaccaaatttgcgaggatatcttccagtacctagcatctgccggcttcacacccgacccgcttggtctacccggtggcttgaggtataagcaaaactatattcctagttatacgcaaattgacgttagtcgatttccgtcttactttgatacagtttgccatcttcaagaccctgcccgtgaaatcctaacagatattatattgccgaatagcaaaattctgggaaaacgacggcgcttgtggtatacgcagc

SEQ ID NO: 1637 - DNA, 1442 bp, Poaceae Liege partitivirus 8
  source 1..1442: mol_type = other DNA
atggctggcaacaacaacaacatcaatggatacgactttacagagtaccaggacgagttccaaattctgtatagtggtcatccacacgtcatccgcagagagcaaggggtgacatatcacgaccagtacgctttgaaagagctacaggcacgatacccagagtactacagccaattcatagaaggttggtccagaagtttctaccttggtagcaagcacatggagtccatcaggcagtatgactcaccaaaccgaacagctcaagatatgaacgtatcgtcttacaagaaggcatacttacatgtccaagaacggttacgtagccttcctattgtgagggcattcgacgtattatctgaacttgacttagtcaaattcgagtcgacctccgcagcaggctacaactactccggcccaaaaggcgaagtaggtggtgaaaaccacaataaagctatccggcgagcgaaggcaattctatgggcatcttacaacccagaagaaggcatcgaccacgttatcaaagagatgacgccagacgttggatacacccgcacccaattggcagacatcaatgagaagaccaaagttagaggagtatggggcagagcatttcattacattttacttgaaggcacatccgcacatccactactgaatgcattcactgaaagtgaaacattcgttcacattgggcctgatccaacacttagtgtaccacagttactatcacatatcgcaaaatattgcggatggatttacgcaatcgactggagctcattcgacgcatcagtcaacagattcgaaattaacgcagcatttgacttaatcaaagagcacattttcttcccaaatcaggagacagaacaagcttttgaaatcagtcgacaactcttcattcacaagaagattgctgcgccagatggcaacgtttattggacacataaaggaatcccttcagggagttactatacatcaatgattggttcaatcgtcaacatgttacgcatatcatacttatggtatgagttactcggcagaccaccaaagatatgttacgtgcaaggagacgactccattagtggagacgacgaacggataaatcctatccatctcgcacaactatcagaacctatcggatggaagttacatccagagaagacggagatttcaagatacccagagggagttacattcctcggcagaaccagttcaggaggtatgaacatacgcgacttaaagcgatgtatcagactactgattctaccagagtatcctgtaccgtcgggatcaatttcagcttatagagctcattctatcgcaaaagatgcaggaggcagaagtgtcattctgaatgagatcgcaagagcaatagcgcataagtacggtagagcaccaattagtggcgttccaaaacatttcatcttatatagattcgcagtgta

SEQ ID NO: 1638 - DNA, 1899 bp, Poaceae Liege partitivirus 9
  source 1..1899: mol_type = other DNA
atgggatatagaaaatctttggtaagatctccctcaaagcctaatctcccccgagcaccgaacttcactcaaagttccccccctgctcaccccctcgcaatggatttacatcacaaagctcttcgcgctctcaacatcgaccccgagaaagatcctggactcgtccacatctacagcgaaaagcctgccccgccattttcaggtcatccctactacaaagagaattatcaggaccttgtcctcgatgctttaaatagcactctctacgcagaagacctcgataccgttattaacggatattacagaagtcccatgaccatcgaagctcaatacgaagatatgatgaagatgaatcaacccccggttcacatcgtccaagatgatgccttcaacactgctttcgccctcactatgaaagccttcgctcccaccgaaaaggttcgagtcgtacactacgtacgtacaaagcactacccatggcccctgtcctcaagtgtagaacgcccgttctcagttgacccgactgttcgcaagtatgtaaaagaaaaatgcatagcccgagagatcgttgacgaaaagatgtcgttccacaacacatttgagtatgtctataacgccctccgccaccctgtccaccgaattaagaatggagaatgttttacaggagatcttaccaaagattttctatatcccatcactgcccattttcgtcccggacttggaaaaccaggctcaactgccatcaagaaccgtcttgtatggggagtatccaaattattcctcatcgcagaatgcatgttcatgtacccactgtttgataactacctccgtcatggaaccacccccatgctttggcactacgaaactatccttggaggaagcactaagttacacaacgaagtgactccccaaatatcccgaactcaagtcacggttataaccgccgactggtcagaatttgaccgtcgagtacctttcgaattaatcgaaatggttattaatgcctctcttgaatactatgacctaggatactacgcacctgattatctctatgataccagatcaagctgtaagtacgatattcccagaatactaaacctattcaaatggactatttatgcgacactatcatcccccctacttatgccagacggcagagtatggatgcgcacccgcaacggcgttccatctggaatgttccgaactcaatggttagattctattataaatggaattatgatcacgactatattgctggatgccggatttaaagttaacgaaaagtttatccttaaagtccttggagatgactcactatcaatactctttcactatgttgcacccgcccaacacgagaacctcaaactcgccttagctgaaagtgcccgcatccgatttaacgccaaactgtccctagaaaagactgaagtttccaactccatgtatggaatggaactccttggctaccgaagtaagaatggagctgcctacagagatcccctcaagttactagcccaactactctaccctgaatcagaagccccaacatttgaatccctcatgggaagatgtgttggaatagcctacgccgaccttggccgcaccaagattcttcaaaccgtatgcaaaaagatctttgacagattatccgctgaaggttaccgccctgacccccgtcacgttcacaggttcctatccggctctaaatttgtcgaatctcgtctggagatttcccacgggaagtttccgacacccttagaaatccagagatggttacgcgttccctataaaagaactatgcgcgataacgaccattactggcctcctgagatcttcaagccgtccttcaaagacgacctggagactgttttgattggtctgtctagactaattctttag

SEQ ID NO: 1639 - DNA, 826 bp, Podosphaera partitivirus ptbx-09
  source 1..826: mol_type = other DNA
ccacgcgcctaacatcaactatccagacacttcaagtgactggtccgatcataaatctttgcgaatcgaaaatttgtggatgtggtgtcttgaaaaccttttcactgctcctatcgtcttacctgacggtcggatgtacatacgacacttcgctggaataccttctggcttatacatcactcaactactcgactcttggtacaattacactatactagcaacaaccttatctgctatgggcatcaaccctaatgagtgcatcatcaaagtccaaggtgacgactccgtcactagactttgcacactcataccgcctgaagaccacgacgtttttttgcagcagtttcaagatctcgcacaccactacttcgcagctgaagtcgctttcgacaaatcagaagtgcggaaccaccttaacggtgtcgaagtgctatcgtatagaaacaatcatggattacccttccgtgacgagatttcaatgctcgcacagttctaccacactaaagctcgtaacccgactgagtcaattacaatggctcaagctatcggcttcgcctacgctagttgtggcaacaacgaacgtgtactactcgtcttaaaggatgttcatgactactacgcccgtcttgggttcacacccaatcctgcgggactgacgctcgtgtttggcaattcgcctgaccgcgcttcactgaatatatctttgagccgtttccctaccgttcatgagatcaagaaatacctaattagttttaagtaccgaaataagaatcaagaccacttaacgtggcctcttgattactttatttcgtcaccttgtacttaa

SEQ ID NO: 1640 - DNA, 1728 bp, Podosphaera prunicola partitivirus 1
  source 1..1728: mol_type = other DNA
atgtgtttctctaagattacaaatcttgaacgactcggtaagaagccggttaatcgtcgtctccgtcgccaacacgatcgggtatccaaacgcacacagctatttactcaacgagcaactcgaaaggcaatttataaaacttgccccccacaaatcgccgaacaagctattaatgggtattatcgatctcctactgacccagctgctgcagaagaagactttcttaaaacggatcagccctatattgatgttccacgagactaccattatcttcgagctctacgagctgttgagaagatgtttcgaccatctcgacgactacgtccaatcgcgtttcctgacttaaggtattatccttggtctttgaatactagtgcggaagccccgtaccgtgaatctgacgagtggtatgagtatgttaaacagaagcatcgagaacaagaagttgatgatgaacgaatatcgttccacaacctatatgatgagctcttcaataagaatcgaggcttaattcatttaatcaaagaaggtaaacaacctttctgggattcagatggaaaccccgtaccctacgagttcacctacttacattctcgcgcacatatggttagttcagaccgcccacccaggattcgagccgtgtttggtgttcctaagctattattaatggctgagaacatgtttatatggaaccttcaaaaggaatacttgaatcgacgtgtcaaccgaggcccactgctttggggatacgaaacatttcgtggaggatggactcatctagttcaacgactctgtggcaaacagataaactcaatcatttcagccgactggagtggatttgatcacaacgctttacacgaagtgatcgatgacattcatcaaatgtggcgaagatggtttgactttgactctggctacgagccttcaattagtaacaaccatgactattcagatactgaaactgatgaaatacgaattcaacggctttgggattggatgtgctattcaattaagcgcaccccgattaaagctgagtccggtaacatgtatagatggaaattcaatggatttgcctctggctttcaacagacacaactccttggctcatttattaatgcaacctacatactcacttccctttcagcctgtggaatcaacattgatagtgatcattttcaagcactatttcagggagacgattcaattactaccttccctgagagagttgatttcaaaactttcattccgaaagtttcgaatgaagctaagcgcagatttaacgcaaacctttccatcgacaagactacttatggagattggtttgacggcatcgaagtcctttcctatgcatatagaggaggatttgctgttcgagatcctgctagtttactagctcatttattgtatcctgaacgccccaagaggcctgaggaactcgctgcatcatgcatcgggattgctcaagcatcgatgggaatacgatgcgtctacgacgcttgccttgacttgttcacctttttagttgaggaactgaagatagaaccctactttcctgaaacggatctaaacagacccttcaaatggtgggaacctacctttaggtattttccgactttcgaggaatgcttccttcaaaattttgaagatgcatttcgcgaccagtctgttaagaaccgactctggccaacacagccagtaggaaacggtttttgttttctgttgccttga

SEQ ID NO: 1641 - DNA, 1755 bp, Podosphaera prunicola partitivirus 2
  source 1..1755: mol_type = other DNA
atggctcccacaaatttacttcgacttgagaagattcctcaacgatctagatacaatgaaccactttttcgaaactttcgtactaatcgtgttagacaaggcattatcaaacgtgcaatttataaaatttgtccactcaaattagcaagaaaagtgatttatggttatcgcagatctgaaggtggagatgaactagccgagacggactttcaacgatccgacgttccttactttgacttaaaaagagattatcattaccaacgcgctcttcgtgtttgtgaaaaactctttcgtccttcaagaacgctgtatcctatagcctttcccgacttacgtttctatccttggactctctcagtatcagcagaagcacctttttccatagagaagaagtggcttacttcaatccgcacccgtcaatctgaaggtgaagatttagatggtagactcacatttcataatctatacaatgaaatttttgaactcaaccgcaatctaattcaccagattaaagaaggtgataaatcattttggaatgaagatggaaccccaagaccttattggtacaatactttacatactcgttctcacatggtacaatccaatgaacctgataagttgcgtgctgtctttggtgtcccaaaactgttactcatggccgaaaatatgtttatctggaatctccaaaaggaatatctgaatcaaaaagttcagtctcctttactatggggtttcgaaacatttaaaggtggatggcttaaactttggaacagaatgtattctaagaaatgttcaactttcttgtctgcagactggtctggatttgatcgtttcgctctttttgagtgtatcgatgatgtccacaatatgtggcggaattggtttgactttactcaatacgaaccaactcgtgctgaatccggtcctcctggaattcaactttcctaccctcactccaaaactaacccttctaagattgaaaacctttggcaatggatgtgttactcaattaaattcacacctattaaaggtcaatctggccaattatatcagtggcaatacaatggtatcgcttctggttatcaacaaactcaactcattggatcatttgttaattctatttatatattaacatgtttatccgatcttgggattaatattgaatctgacaactttcaattgtttgttcaaggtgatgacagtttaactggattacctgaaattatagcaaacgaagacattcctaactttttggaacgtcttgcaaaagttgcaaaacaacgattcaacgccaatctttccgtagctaaaactgctgctggcgaatccttaagtgatgttgaagttttaagttatcacaataaatgtggtatcgcataccgtgatgaagctgagcttttagctcatttactttaccctgaacgatttcaaacccttgaagcaaccgtttcttgttgtattggtatagcttatgcatcaatgggatgctctaggttagtctatgacacttgtcgtgacgcctacaaatttttgactactcaattaaaagtagaacctgatcttaagttcctacaggatttctttcgtgttagaggttctcctttaaccgatgattaccgtgcccctcgtttcccaacatttgatgaatgttttcatcaaaactttgaagtcagatctagatctgaatcagagaagcaacgactatggcccacaaatccatcaggcgattatggtttccactttatcaacgaatag

SEQ ID NO: 1642 - DNA, 1860 bp, Podosphaera prunicola partitivirus 3
  source 1..1860: mol_type = other DNA
atggactatttgactgatgctttcaaccgcatcactgagttctttaacaacgacaaaaatcttgaattagtcggtacctaccactacagaccagctccgcctgctgtacaccccgaacacgtcattgcacataaacgcactgttttacatgctatgcaaagatttctcttcccacgtgagattacatacatcactgatgaactgagaagatccgatgtcactctcgaagcgatactcgatgactttttcgctaacgacgtacctgaccacaagataccgtttgatgaacacgttgaaaatggccttaacgctatggctgacgcttttcgccctccgaaactagctcgcccttgtcatattaatgacgtagagcaccactacccttataaatggaacgtgaatgctgagccgcctttctcaaccgacaaatacttcctaagtaatcgccacctttttggtgacttttacaactctaccaacaatacatgggataaatatatcgacccgctcgatatggaacgccgttattcacatagaatcgaaaaggttctaaatcaagtcacaccacctaagtttggcttcatgaaaaacgccgtattctcttggactcgccgctggcatcacgtcataaaagacggattcaccaacactgccggccttgactcctctgtctacctacgtgacagatacatcttcccaatgttattacataccaaaaccgcaatcgtcaaaaaggacgaccccaacaaaatgcgtactatttggggatgctccaaagtttggatcatcgccgacactatgctttggtgggaatatgttgcttgggcaaaactcaacactggagcttctccaatgttgtggggctacgaaaccttcaccggtggatggctacggcttaacgccgctttaatgtccagttactatcgtcattcctttttaacaattgattggaaacgtttcgacaaacgtgcttactttccgttaattcaacgaataatggaaaagactcgcaccttccttgacttcactcaaggatacgtccccaacgttaactacccagatacctcaaaggactggtccatcaataaagcaatgcgcatcgaaaatctgtggatgtggtgtctcgaaaatctattcactgcacctatcgtcctcccggatggtcggatgtacaaacgacacttcgccggaattccttctggtctatatatcacacaactcctcgactcttggtataactatacaatcttagctactatcctgtctgctatgggcataaacccacgacagtgtataatcaaggttcaaggtgatgactccatcaccagaatcaacactctcgtaccgcctgaagaccacgacgtctttttacagcagtttcaagatctcgccagttactacttcgcttctgaagtctcttttgacaagtcagaaatccgaaaccacctcaacggcgtagaagtgctatcgtataggaacaatcatggaatgcctttccgtgacgagatatccatgctcgcacaattctaccacactaaagctagaaacccgaccgaatccataactatggctcaggccatcggtttcgcctacgctagttgtggcaaccacgaacgagtgttactcgttctgaaggatgttcatgattactattctgacctcggtttcacaccaaacccggccggattgacacttgtgtttggcaactcgccagaccgtgccgccttgaatattcctctgaacaagtttccaaccgttcacgagatcaagaaatacctaacaagttttaagtacaggaacaaagttcaagaccacttaacgtggccacttgaatactttgtctcccctccctgtacatga

SEQ ID NO: 1643 - DNA, 2142 bp, Podosphaera prunicola partitivirus 4
  source 1..2142: mol_type = other DNA
atgtcaatacacaagcttcgctcatacttagctgaacgtaaggaacgaattaaattcgaatggcaaagattccaagcatcccgcgacggaacttcacctcctcctagtctaactgactcagacattcgcagacacttcgagaaccaacgtgaccgacaacttgaattcgacgctcatcgcgcattggaacatgaatttgatgctcttaagcacaccatgcacctccaaaacgacacaaaacatgagaattttgaatttacttcgacacaaggattcacttcatttcctgaaaaccgctccccagcaccaggaatcattggagttccaaagcaatttcattcaggacaaacagtcaatgtgactgaacagctcccagaaaccggctttcaagtacaccccttaatcaggcaactacttaggaacaaatatccattgtatgaatactacgttgataaatacgtccgtcctcttggcacaaccgatgctactttcactgactttaatcgtcagcaagtaggtactgctccgatcccggattttagaaaggaacgcattctcaaccacatgtttaaaagattgaacgccacaccgtatctacctttacacttcgttgacacacaatatgcgaaattaccgcttcacactggtacaggctattttaaccgccactcctttaaaacccgagctcatgctaaatactcgcacccacctgagtacgctcagaagcaaacatccaaaggttatttttataacgctttttatgaaactgctcgcaccacgattcaccgaatcaaagaaactggactaccatttacttttgaatttcgagatgacaaaactgatgatgagaatttcatttcacttgcttccgcactcaacgcattctttgacagtcatgccaccatgcttttcactagaaatcacatctctgaacgagacggaatcctcaaacaaaggcccgtttacgccgtcgatgatctttttcttctaatggaagtaatgctgacattcccacttcttgtcatggcccgaaaacccgaatcatgcattatgtatggtctcgaaactattcgtggcgcaatgcactatatcgataggttagcccgtcaatatgattccttcttcaccatagattggtctcaatatgatcagcgtataccacgctcaataaccgacatctattatactgatttccttgaaaggttaatcgttatcaatggaggctatcaacctacctacgagtaccccacctaccccgatttaacagatgaatccacctttatcaagatggacaacttactgcactttctacacacatggtacaacaacatgacattcgtcaccgctgatggatttggctaccgccgaactactgccggagtaccttctggtctatataatacacaatacctcgattcttttggaaaccttttccttataattgatggatttattgaatatggctactcagatgtgcaaatagatgacattctgctatttatcatgggtgacgacaattctggttttactcatataccaattttcgaactcgagaaatttctcacatggtttgaaacatatgcgtactctagatataacatggtcttatctaagactaaatccgtcatcactgatatcagagggaaaatcgaaatgttaggctatcaagccaactacggtaatcctctccgaccaatcggtaaacttatcgctcaattatgctatcctgaacgtggaccaaaagacaaatacatgtcttaccgcgctatcggaatagtttatgcgtccgctggacaagatgtagaattttacaacttttgtaaagatatctaccacacattcttgccttatgctgctcctgctgaagaaataaaattgtctcaatttcattcttattttccaggctatcttcgagcattggacacacctgatgagtttttcaacattgatcactttcctagattatgggaaatccgagatatctactctagatatgctggacccttaaactacagtccaaaatggaatgaagcacatttcatcaacgacccgaacgtgatcccaccctccgctgtaactatggctgaatatcgagtgacacaccaaattcctcgacgtcctgtccttaatgttacaccctag

SEQ ID NO: 1644 - DNA, 1746 bp, Polygonatum partitivirus 1
  source 1..1746: mol_type = other DNA
atgcagaacctacatgtcattggtcacattgatcgccctaaggctatcaaaaccaaagactatcataatccccagtataaagggatcgtttttaacgcattcaagaaacacttgactagcgaagagatcgaacaagtcgtaaccggctatcgacgctccacgtggtcagacgaagcattcgcttccaatcttgagtacattaacgtctctgaacacaaggttattaaggatgaacattatgaatccgctctttcagaaatgaatcgacggttttcacctaagtccaaacttaaacctgtgcactatgctgatcttcgtctttatccctggagactttcaactaacgttggagccccatataatatatcggagaaatggattcagcacataaatgctaaattcaattcaggattaattgataataatagaatgtccaaacataatctgtataacgaattcttcgttaataacagatacttattccatcgtattaaagatggtcataccactgatggttatgacaatgatcttaaatactggaacacagcttttgctaggcttcatctcgttcatcgagacgacccagacaaagttagactagtgtttggtgcacctacccttctgttacaggctgaaatggccttcatctggccaattcaagtttcgttactgaatcgtggcattcatagttcacccatgctctggggctatgaaactattaccggtggctggaaccgattgaacacctggttcactcaccaccaccctaggttaacaacttattttgctttcgactggtctcgatttgatcagcaagcaagacacaccgttatcgacgacatacatgaagtatggcgtacatggtttgacttctcttccggatactgtcctactacaatctatcctgagacaaaccctgagcccgagagactcgaaaatctctggcaatggatgtgttcagccgtcaagaagactcctcttctactcccaaacggcgatctagttgaattccgacactctggaatcttttctggctttttacaaacccagattttagactcctgctataacatggtcatgatatttaccgtcctatcaaggatgggttatgatctctcaaaaatagcattgaaagttgaaggagatgactcaattggtggaatacttaacactataccaccttatctctatcaatctttcttagaaactttcgcatcttatgcgaaggattacttcggatccacacttaacgaaaagaaatcagaaatttctcacacccttgagggtatgaccgtcctaaaatataggaatcacggttgtgtcccgattaggcgatgggatgaattacttgcgatgctctatcaccctgagcgatcacaagcactcccaaatctaatggctcgcgccgttggaatcgcttatgccaattgcggtatgagtactaaagtttatcgtatttgtgaagatatttttaactatcttcgcgcacttgatatttctccaaacccaaagggtttgcctggaatatttcaattcgatgaattcttccgtccgtcagctattcctgacgatgaaactggtttcgctcctatccccattaggaaagagatcaagtcactacttgacattgatctatcccactttccgacttattttgaaacaatacatcttttgatgaatgatgatcgcactctactaaccgatcgtcactggttatcaaccttctttctcgagattcctctctag

SEQ ID NO: 1645 - DNA, 1440 bp, Polygonatum partitivirus 2
  source 1..1440: mol_type = other DNA
atggagaaaccaaactacattggatatgatttcaaggactttcaacaagagcttgaagacttggatcagacacatcccaatgtcatcagacgtgagtctggtgttacttatagagacgagttcgcattacttgaactccaatctattagtgaacggcattacgagcaagtacttgaaggctggtcaagaagttactatcttcctgaaaagcatctcgaggctatccttgcttattctatgccaaacatacccagtaactatgtcaatcaaaagatgtatgcacaatgcatcgacgtagttatagaagggttacgtagccttcctagcgtgagggcttttgacgtcttgactgaattggatcaagtatcgtttaagtcgtccacagcggcgggttacggatatattggtgcgaaaggtgctccgggcgatttaaatcaccgaagagcaatagcacgagccaaagcagtcatgtggtcagctatcaatcccaaaggagaaggtatcgaccatgtcctaagtactgctgtaccggacgtcggctatactcgcacgcaattgacggagattaccgtgaagacgaaagtcagaagtgtatggggcagagctttccattacattctgcttgagggactatttgcagatccactgcttaagagttttattgagacagagactttctatcatatcggtcaagatccgacacacagtgttccaaatattttatcaatattatctgagcaatgcaaatggaaatatgcaatcgattggaaacaattcgacgctacggtcagccggtttgaaattcatgctgcgtttgacattctacaaagtaaactgatctttccaaatgacgagacaagacagacctttgaaatttgcagacagctatttattcacaagaagatagcagcgccagacggtaaagtctattgggcacatcacggaataccttcggggagctatttcacctcaattgttggttcaatcatcaacagactgagaattgaatacctctggagaactatcacaggacacggacctaagatatgttacacacaaggagacgactccctttgtggtgatgacattcttatcccacctgagaagttcgccgaagttgctaaccttataggttggtacttcaacccggacaaaactgaatattcagtagctgcagaagcagtatcctttcttggtagaacataccatggaggcatgaatgaaagagacttaatcaaatgtttaaggctactcattttccctgaatatccagtgcaatctggaaggatttcggcctatagagcaaggtctattgcagaagatgcaggaggcattagcgatctactcaatcgcatagctctgaggctaaaacgtcaacatggggtcgcttctgaagaagaagttccatcttactttaaactttatgtattaaatatgtaa

SEQ ID NO: 1646 - DNA, 826 bp, Pseudogymnoascus destructans partitivirus
  source 1..826: mol_type = other DNA
aagaattcgaccgaacaatgtacgaaaacatttatggatacacgcggaagcccgaaggtccgcagggtatgtataaatctctgttaaaattctcagaggacaagtcaaccttccattcgctcaatcgtgtacaacgtagagcaatgattggtgccattaagaaagcgaggactgctttcaaactaccttggaaaagagaaccccttgactggcatgaagtaggtcagttccttcgccgtgatacggcggctggagcaaccttcatgggcaagaagaagggtgacgtgatggaagagatctatcatgaagcaagatggttagggcaccgtatgaagcaagacggtcgtgaaaagttcaatcccaaaaagatgaggttccctccttgtctagctggtcaacgtggtcacatgtcagaacgtgatacaccaaagacccggctcgtttgggtttaccccgcagagatgttgtgtgtggaggggttttacgctcctcagatgtatcgtgatttcatgaacgatcgtcatacaccaatgttgaacgggaagagttctcaacgcctatacactgaatggtgtgttggactaagggaaggcgaaaaactatatggtttagacttttcaagctttgattcaaaagtaccttcttggttaattcgtgtggcatttgatattcttcgtcagaatattgagtggtcaacgttccgtggagagaaagtgtccaagcgtgaggcccagaagtggcgtaacgtttgggatgctatggtctattactttataaacacaccgatgctcatgcctgacggaagaatgttccgtaagaggagagg

SEQ ID NO: 1647 - DNA, 1620 bp, Pseudogymnoascus destructans partitivirus 1-pa
  source 1..1620: mol_type = other DNA
atggaagtatctcctttcgaccccaccccattagataacgtcatagaggggtcccctttagtggacgactcccttctagttccaagttccagaactagaggttccagctatgatgtgattccagaacacttcaattcacctggactaaccgaaatcgcacggtatggtggctatcctgtttactcaggtggctccaatactgatgcgtgggtccggacgagtttaaaagaattcgaccgaacaatgtacgaaaacatttatggatacacgcggaagcccgaaggtccgcagggtatgtataaatctctgttaaaattctcagaggacaagtcaaccttccattcgctcaatcgtgtacaacgtagagcaatgattggtgccattaagaaagcgaggactgctttcaaactaccttggaaaagagaaccccttgactggcatgaagtaggtcagttccttcgccgtgatacggcggctggagcaaccttcatgggcaagaagaagggtgacgtgatggaagagatctatcatgaagcaagatggttagggcaccgtatgaagcaagacggtcgtgaaaagttcaatcccaaaaagatgaggttccctccttgtctagctggtcaacgtggtcacatgtcagaacgtgatacaccaaagacccggctcgtttgggtttaccccgcagagatgttgtgtgtggaggggttttacgctcctcagatgtatcgtgatttcatgaacgatcgtcatacaccaatgttgaacgggaagagttctcaacgcctatacactgaatggtgtgttggactaagggaaggcgaaaaactatatggtttagacttttcaagctttgattcaaaagtaccttcttggttaattcgtgtggcatttgatattcttcgtcagaatattgagtggtcaacgttccgtggagagaaagtgtccaagcgtgaggcccagaagtggcgtaacgtttgggatgctatggtctattactttataaacacaccgatgctcatgcctgacggaagaatgttccgtaagaggagaggtgtaccatccggatcgtggtggacccagatgattgacagtgttgtgaattacatacttgttgattatctgactcaatgtcaaacgtgtcagatacgtggactcagagtgttaggtgacgattcagcgtttcgttcttgccatgattttagcttagatcaggcgagcgctgatgcagcagcagtattgatgatactgaatcccgataaatgtgaggttactctggaccccacaaaattcaagttgcttggaacaacgtatgaggacggccatcctcatcgtgaaacaatcgactggttcaagttcgcgctgtaccccgaatcatctgtttcatcaatagatgtgtctcttactaggttagtgggcctatggctcggcggagggatgtgggacttacacttttgtaagttcatggattatttccaaacatgtttcccttgtcctttggaaggctggttttcaaaggatcaacgccgttggctggaagttatcttctcaggcaaggctccacgtggctggacgactaagaaaagtctgttctggcactcaatcttctatacttattgttag

SEQ ID NO: 1648 - DNA, 1620 bp, Pseudogymnoascus destructans partitivirus-pa; identical to SEQ ID NO: 1647
  source 1..1620: mol_type = other DNA

SEQ ID NO: 1649 - DNA, 1530 bp, Puddy partiti-like virus
  source 1..1530: mol_type = other DNA
atgatcttggaaaattaccagaaggatctacagctatttcgtaggaatcgataccggtcgaagcgtctgaagtcatattttgctagatttagcaaagatgacaataccatcttaattgatccctacgtaagagatgtgcttttagctcagggtatctcagttgaggagtcaccccgatccatttactcagttgagaaactatttgaagcactatcacactatgcgcccgggaaaatcccgaaacccaagccgtgtgcagagttcacagcgggagtcgctctagcgtataagtgttttgctcggaagagggaccagttacagttacacatacttccaatgacgccggaaactatcgtgtacattacgtcaaacccgtcgggctcgcctggtgtaacaaattttggttgcacgaaagctgagtcacaaactcgagcattagagcgtggcattcaaactgtgcagggagaaaagaaacctgaaccatgtttggcttttaagcgaacacaattcaatgagaaaactaggctcgtgtggggttacccatactccatgacattcattgaaggattagtagcgaagcctctcctcgaacagtttaagggcggttgctcacctatggcctttgccatgtcaactggggctctaggaactaaactgcgtgtagctagctatcacaaagaatgggcctactcattagacatgtcgcaatatgatgctacaataagtgcgcaactaatccacatcgccttcaaaattctgagaacttggttcgatgaggctgaagtggaaccggtttcgggtaaaaccgtcggtcagatatttaatttgatcgagaagtattttatacatacgccaataatcatgccagatggtaacgtttattacggtaaagaacatggtgttcctagtggttcatactttacccagttagttgattccattgtcaatgtcatcattggcgggacaattagcgcaaaattcaacatgcacgtgtcaaggcgagaaatcttcgttctaggtgatgaccttcttatgtggtcaaaccgtttaatggacttagatgttattgctaagtacgcaaatgaacaatttggcgttagactccacggttctgaaaagtcgaagcgatttcattacgatgagacgattcactatcttggtcgtgattggacaaatggtctaccagatctgcctgaggaggaaattgtgaaacgtatggtttatcctgagtcattcaggaaatacgcgaaagacccggatgatcgtaagcgtcaagtgcatatgatgttgctagcttacgcgggtacctaccgaagcgcctggaggattgcttatagagccattgactcaagtgatcgtaatgttcaccgtggctgtggcaacacagatgtgaacgtttacatccgcgagggtcgtaaggtggaactaactcccgaacatatgagtggactgatgaggtttctcttccgggagcacatgtttggcgacaccggagacatccctattaccgcaatacagtactggctatga

SEQ ID NO: 1650 - DNA, 1722 bp, Raphanus sativus cryptic virus 1
  source 1..1722: mol_type = other DNA
atgtcaaatcttgaatacctcggactagaccatcattggcccgccatcccgcggtttgcgaaatcacctaacgattggtacttcgcctgccaacaactcgtccgctcatcgatctgcctctactccagtctactcggctctaatgacaccgataccgtcctcaatggatattaccgctctcatgctgatgaagacaccgctgaacaatttttcatgcgatacgacgttgagcctttcgacatcataaaagataactactactcacaggcttttgatacagtgactgaatggtttcgaccatctgctcctattcaccctgtccattttaccgacgtaagatggtacccctggaagatatctactagtgctgaacgcccgttcacgcacgaccctttactcaagaaaaaggtgcaattatccaagcaactaggccttctcgacaatgctcgaatgtcctttcacaactgctacaatgatatatttacctattgccgtcactacactcacgaagtgaaagacgcgcgacccgtaactctgcaccatattgacttacatgtgaaacctgctctggttcgctctggcgaacctccaaagatcagaaccgtgttcggagtccccaaatccctaatcttcgctgaagctatgttcttctggcctttatttagtgattattttactaactctgaaacaccgctgctatggaactatgaaaccttaaatggtggatggtatcgtctgaatgacgaattctatcaacaatggcaaagcttctgcactatcttcaaccttgattggagtgaattcgatatgcgagtttacttctcaatgctcgacgactgccgagacgctgtcaaatcatacttctgtttttgtgggaactactgtcctacccggacttaccccacatgccgaactaaccctcagagactccaaaatctctggaactggatcggaaccgcttacaaagacacaccttgtactaccacgaccggcaaagtctatcgacgccgattcgccggaatgccctccggaatattctgtacccaattttgggactcattctataactgtattatggttgtcaccaccctagaagcactaggctttcgaattactgaccgttacttcctaaaagtattaggcgatgacgttattttcggaatcctcaagcacatacccatttcgaaatgggctgactttttgcaagacttctctaccgaagcacgacgccgcttcaattcaaaattgaactccaagaaatgtggcgcatcctcaggaattcacggtgcccaagttctcagctacataaactggaatggataccccaagcgggattcaaaccaacttttagctcagttactccaccctaagtcactccgtgatacttacccaaggctcatggctcgagcgattggaatctactacgcaagttgtggagacccaaaaattcgcccgatctgtaaccacatatactcggaactcaaatacgctggatttacccccagctcgaccggacttcatggtctgttcgacccaaacgcctctataggctttatcgaactcgatcactttccctcagaaaacgaagtcacttgccgactacaccgcaaatccaaaagaagcgctgaactgcaagcactctactggcctcgcgaccacttcctagaagaagctggaagtagcaggaactgccccctgtccttccaagttgagacgatctaa

SEQ ID NO: 1651 - DNA, 1434 bp, Raphanus sativus cryptic virus 2; identical to SEQ ID NO: 614
  source 1..1434: mol_type = other DNA

SEQ ID NO: 1652 - DNA, 1446 bp, Raphanus sativus cryptic virus 3; identical to SEQ ID NO: 617
  source 1..1446: mol_type = other DNA

SEQ ID NO: 1653 - DNA, 1851 bp, Raphanus sativus cryptic virus 4
  source 1..1851: mol_type = other DNA
atggattacctcacatccgcatttgaccgaatcactcactggttcactaggcccaccaacctcgaatacatcgggaacttcactctcccacctggcattctccgcgtcaatagcaccgctattatcaatcaccaaaagacattggactttgctttcaacaagtatctttatcctcacgagatacaccaaatcaccaaggaatttcgccgttccgacatcgaactcgatgccatacttgacgacttcttctccggtgacgttgacccattcgaaatccctttcgacgaacacgtcgaatatggccttacctgtatggctgacgcctttcgtccgcctcgactttgccgccctgttcacatcttagatgtcaaacatggttacccttacaaatggaacgtcaactcagaacccccgttctcgaccgacgaatacttcctttcacaacgtaagactttcggcgaattcatccaaatgcacgaatatgagcacatcgataaagccgacttcttccgtcgccatcctaaccatgaatcccatgacttgctacgcaccatcgtcccgccaaaatttggctacatgaaatctatgattttctcttggacacgccgctggcaccacatcatcaaatctggattcactgaatctacaggactgcgcacaaccggatacttctacaatcggtttatctttcccatgctactacacaccaaaactgcaattgttaaattcgaagatcctaacaagatgcgcaccatctggggcgcttccaaaccttggatcatcgcagaaaccatgctctattgggaatacatcgcttggataaaactcaaccctggcatcacaccaatgctctggggctatgaaaccttcacaggtggatggttcagactgaatcacctactctactgtggactcatcaaacgatctttcctcactcttgattggtcacgcttcgacaaacgagcgtactttcctctcatacttagaatcatgcaaactgtccgtactttcttcacattcgaagaaggctatgtcccaacacatgcagctccgtaccaccctcaatggagtcctacaaactcacaaagattggagaacctttggctctggaccctcgaaaatctattcgaagcacctatcatcttacctgatgggcgcatgtacagacgtcacttcgctggaataccttctggcctgttcaccactcaactgctcgactcttggtacaactatactatgctcgcaaccattctcagttcacttggcttcaatcccaaattctgcatcatcaaagtacaaggtgacgattcaatcgtccgtcttggagccctcatccctaacgaagctcacacttcattcatggaaaggctcatctacttagcaggatactacttcaactcagtagtcaacgtcaagaaatctgaaatttctaactcccttaatggtcgtgaagttctttcttaccgtaatcacaacggattcccccatcgcgatgaaatcgctatgcttgcccaattctaccacactaaggcaagggatcctacccccgagatcacaatggctcaagctatcggctttgcttatgcaagctgtggcaaccacaaacgagtcctctgggtcctgaaagacgtatacaactattacaaggatttaggctacaccccaaaccgtgccgggcttaccgttacattcggcaactctcccgacctcgtcatgcctgaaattcctcttgaccactttcctactgtcaatgaaatccgtcgttactacacaaactcggatttctcaaatgaagcacaraaagctaaaacttggcctaraacgttgttcatcaacgctcccggcgagtaa

SEQ ID NO: 1654 - DNA, 1758 bp, Raphanus sativus partitivirus 1
  source 1..1758: mol_type = other DNA
atgaagaacacacttcagataggttatttgcccaatttggctaggccaattcatggagattccgacccaggtcgaaacccagcctaccagactacggtcgatcacgcacttagaagattccttacactagaggaattcgaaactgttacttctggatatcgacgctccccttggaacgaagatgcccttaactctgacatcgagaagttagactctgattatcactcagtatctaaagactcacactactataaggcaattgaacacacaagaaaattgttcacgcccagagagaagttaaaaccggttcacttcaacgatttgcgtcattacccctggcaactatcaactagcattggagccccattcgctacaagcgataaatggaagaactgtgttaaccagaagtatgatggaactcttaaaactcaagagtttcgcgatttattcagagacgctcacggcatttcgctagagcctaggatgatcgacagacgtttatcaaaacgcaatctctacaacgagatgttctttattaatcgaattaacattcaccgcatcaaagatggatggactacaaaccagaatggacacgatctcaaatattggcacaccgctcacgcgagacaacacttagttgaagccaacgagaacgacaaagtccgacttgtttttggagccccttctaccttgttgatggcagaactcatgttcatttggccaatccagactagcttacttgctagaggagaggaatcaccaatgttatggggttttgaaaccacaacaggaggatggtcccgcttatatagctgggcttttaccatctcaccacaatttggatctgtcgctacccttgattggagtagattcgacaaagatactagacacacagtcattcaagacattcaccgcttaataatgcgaccaatgttcgactttaactccggctaccatccaacttatggaaatccaacaacaaatcccgattcttcaagactcgagaatctttggaactggatgacagatgcaattctatcgacgccactgctgctacccgatggaagactactgaaatttcaacactcagggatttattctggatatttccagactcagatcttagtctcaatctacaactgcgtgatgatctttactgttctgtcaagaataggcttcgatttaaactcagtcgctctgaaagttcaaggtgatgattcaatcattctgcttaatcaccactataactacttgcgaccatcgtttctacaaatgtttgctatttatgcatccgaatatttcggatcaaagctaaacgaaaagaaaagcgaactactccccacccttgagaacgctgaagtcctgcgatacaggaatcacggcatgatgccattccgtgacgaactacaacttctagcaatgctgagacatccagaaaggaccgcctcactcaatgccttaatggctaggtgtattggaatagcttacgctaactgtggaaactcaacccgtgtatacaaaatttgcgaggatatctactactacttaaagggtattggaatcactcccgatgcatttggactacccggtggactcaggttcagaaagaactaccttccgtcctatgaagaagttgacatcactcacttcccttcatggctcgagactgttgaacacctgatggatccaaaacgaccattgctcacaaataagcactggcccgaaacacactttatcggtatccccggaaagtcctag

SEQ ID NO: 1655 - DNA, 1851 bp, Red clover cryptic virus 1
  source 1..1851: mol_type = other DNA
atggattacttcatatccgcatttaaccgaatcacacattggtttaccactcctaccaacttcgaatacgtcgggaactactcactaccccccggccttctccgtgtcaatgacgttgcaattgcaaatcataaaaagacattggaacactcattcaacaagtatctttacagtcatgagattaaactcatcactaaggaatatcgtcgctcgcctatagacgaagactctatactcgaagactttttctctggagactttgaatatttcgaaatccctttcgactatcacgtcgaatatgggatccaatgcatggctgacgcctttcgtccgcctagactttgccgaccagttcacatattagatgtgaaacatggatacccttacaaatggaacgtcaatgctgaaccacccttctccactgatgaatatttcctctcacaacgtaagacttttggcgaattcattcgtatgcatgaatatgaacacattgataaagatgacttctttcgacgtcaccctaactctgaatcccatgatctcctccgcaccatagtccctccgaaatttggctacttaaagtcaatgatattctcatggacccgccgctggcatcatattatcaaatctggatttacagaatctactggccttgaaactaatggttacttctataaccgattcatctttcccatgctcctacacaccaagactgcaatagtcaagaaaaacgaccctaacaagatgcgcaccatatggggcgcttccaaaccatggatcatcgctgaaacgatgctctactgggaatacatagcctgggttaaactcaatcccggcgtcacaccgatgctttggggttacgaaaccttcacaggtggatggttccgactgaacaatgaactgttctgcggactaatcaagaaatcgtttctaactttggactggtcccgtttcgacaaacgtgcctattttccactgttacgtaaaatcttgcacaccaccaggactttcctcacttttgacgaaggatacgtcccaacatttgcagctcccacccacccgcagtggaatcaagaaaaagcccacagacttgaccgtctatggatctggacactcgaaaatttatttgaggctccgatcatcttacctgatggccgcatgtataaacgacactttgctggaataccttctggcctgtttatcacacaactcttagattcttggtataattacaccatgctcgctaccatcctgagcgcgcttcacttcgaccctaagcactgtattatcaaagttcaaggcgatgattctatcctccgcttgaccactttaatacctgtcgaccaacatgcaaacttcatgtctcatgtcgtcagattagcgtcacattatttcaattctattgttaatgtcaagaaatctgaagtagctaatacactcaatggccgcgaagtactttcctaccgaaaccacaacggcctgcctcaccgtgatgagatcaccatgcttgcccagttttaccacactaaagcaagagatccaacacctgagataaccatggcccaagcaattggtttcgcttacgcaagttgtgctaaccacaatcgcgttttatgggtactacacgacatatacaactactatcacgatctcggataccgaccaaatcgagccggactcactctaacatttggtgattcccccgacttgtttgttcctgaaatatcccttgatcattttccgacaaaatcagaaattagacgttatcttacagctctacactatcaaaatgaagctcaaaacgcccggacctggcctcgtacattgttcatcaatgcacctggcgagtaa

SEQ ID NO: 1656 - DNA, 1710 bp, Red panda associated partiti-like virus
  source 1..1710: mol_type = other DNA
atggccacgatgttagaaactgcttttaagaaagcgaaggtattcccaagtgtcaaagacgcctgcaagggattggacaccccctgggaaacgtctgattttgaggcgatgaagggggtcatcgaaaggatgtcgcgtaagtatactttgactgacccagaccaagtgttagacaaacgtctatacaacttaacttgtgcgatgttgagggagagtgctgcgactaaacctgacaatgttgaaattctgggcttactagagaaagccgtagaaagtaagcgtcttactaaaaggttccaagacccgtctgtcacaagggcgtcgtttcaggactttctgagtccgtctaaagcgtctgcgctttggaaacgagaggttaagggtgcgatggccacagtagaatcatcgctcaacattgttactctagaaccaattagggtgactgaggatacggaatttaatgagctcttttcaaatgataaggcctcagccggattcttctccccaggcagtaagaaatcttcaaagagccgggaaattcttcaccaggttcaacagtttcaattcgagattgagaatgacatcaaaccccgtgaaccatatccttgcatcgcttttaaacgatgccagatgtctaagatggctaacgggaaaacactgaccctgcatactattaagtacaaacaacgttttgtttggggttattcctctgacatgacaggtattgaagctacggttgccagacccatcatcaatcactttgtcaagaacgttccgtggtatgctggtggtcaatcattggagcagattcgtgcgatgataaaatcaaaccgtaaaacatacgattattggtattcaatcgactactccaagtatgattcaaccgttcctaattggttgatatctgctgctttcagtattattaagaagttttatataggtaatcgacttgcactggaaacgttagattacgtagaggatttcttcattaacactactgtcgttctacctgatggtggtgtgtacaagaagtcgaaaggcattccttctggttcatatttcactcaaatcattggtagtttgtgtaacgcaattatggttaatgcttacttccagcgagccgagagagttgagaaggatttcttgttgggtaatagcgcggtggtacgacgcggtttggttcagcaacatagccagacatcatgttcgataatgggtgacgataacttgttcttcactcataaacctgtagacatggtcgagttcgctgattatttaaagcggactttcggagtagtgattcatcctgataagtgtgctaagggtgtttcacaaaaggatgacccagaatatctgaaacgtcattgggctttagaaggtgcatatcgtgatgctcttgaaacattgattaatatgctttatcctgagcaatggaggaagtatgatacatacgacccgattatgattatttggtcgtattggttagggtaccccctaacgtttgatggtctgtttgaaattgagaagactcttgaatacagtgaggatgccctgaaagcgttggagaaatcggattcatgggtaccaagcgctgcactgccgagtggcatggtcgttggccaagcgagtactttggttatgaagggttctccgatggttaaacattggaatgaaggttataagcgaagacttgccgttaagcaggcttaa

SEQ ID NO: 1657 - DNA, 2229 bp, Red panda associated partitivirus
  source 1..2229: mol_type = other DNA
atgcctttcaacaccatccgcaactaccttgccgaacgcctccttcgtgttaagaaagaatggcaaacctatatgaaacatgattcagaccccgaacagacccttcagtcctacgctgattccgacttcgaccgctaccgccgcgcccttcaattccttcctactcttgaagaaaaacgccacatgctccaatccgaatacgataccctcgtctccgctatgaaaatcgaaaacgaaacgaagcaccaaccctatgaactgcaccaacctgtcccttctgacctcccctaccgtgaagatcgcctccccgctcctggcatccgctccgtcccactcatgtaccactctggtcacgtaatccacgctgatcccgccacctctcgcccactcgaccccgacttcgacaccgacgctgctgaatcctacattcctggtgatattgactttggtcccgacatcgatccactcctctacaacctgatcgttacccgctacccttgttacctcccagccgtgaacaaatactgccgtccagcaggcactaccgacgccaccttccgagacttcaacaagcctcaaaagccctccgcgcccattgaccctgcccgaaaagaacacgtcctctcccacgttttccgtttccttgacgccactcccttcctcccacttcacttcgttgatacccaatactgcaagacccctcttgttactggcactggctaccacaatcgtttctcatacaaaatgaaagcccacgctcgctactcgcgccccgaccaatactctgaccgtccaacgtccaaaggttacttctacaacgcaacctacgaaaacgctcgcaccctcattcatcgtattaagtctgatggccttccttttaacatgcacttcttccctgaagatcgtgatcccaccgatgacgaaattcaactatacatagataagtgtaatgatttctttaacgactacccgacactccttttcactcgtaaccacatttcgcaacgtgatggcactctaaaagtccgtcctgtttacgctgtcgatgatctcttcatcatcattgaacttatgctgactttccctctcctcgttcaagcgcgcaaaccctcttgctgcataatgtatggcctcgaaaccgtccgtggctccaaccactacctcgacgccctggctcgttcctactccacgttctttacaattgactggtccggatatgatcaacatctacctcgtgttatcaccgacctctactactccgacttcctccgtcgcctcattgtaatatcacatggctaccagcccacctacgactaccccacctaccctgatcttgatgatcataagctttatgaacgcatggacaacctgctccacttccttcatttatggtataataacatgacctttctttctgtcgatggttatgcttaccgccgcacttcctgtggtgtaccttctggcttatacaacacacagtatcttgattccttcggaaacatcttcctcctcgttgatgctatgattgaatttggcttcactgacgatgaaatctcatcctttgtactatttgtacttggtgacgacaacaccgctctcctgcctatagatatctctcgtgtacataagttcctcacattccttgaaacctacgctctttctcgctataatatgacactttctttgacaaaatccgtcttaaccactcttcgctcgaagattgagaccctcggttaccaatgtaaccatggaaacccgcttcgcgacataaataagctcgcagcccagctcgtctaccccgagaatggactcaagccccacacaatgtccgcccgcgccgttggaatcgcttacgcctccgctggctccgatccaaaattccactccttttgccaagacgtatacaacatctaccgatcgcactatcgtcctgacccccgaatgacgctctccctccgacgtcacgtttaccgtgatatggaagacatccttcctgagttagactccgatactctccctccattcccttcgctctacgagattcgctctctgtactcccagtacgctggcccactctccttcgcaccaaaatggaactacgctcatttcgtcaatcaccctgacgttatccctccctctgcaaagacaatgcgagactacgaactagaacactctctacaagttcgtcaggctcctaccttcgcaacggtcgtctctacccagacataa

SEQ ID NO: 1658 - DNA, 1863 bp, Rhizoctonia fumigata partitivirus
  source 1..1863: mol_type = other DNA
atggaatatctcgtccacgctttcaagatgttctctctcgagccttcggttcctcaaaatcttcaaatgattgggacctatcactacaaaccggcttcgccacacgttcacacaccgcacgttgaggcacataaaaagacggttcttaaggccatggagaaatatctctacccacgtgagatcaacactattgtcaacgagctccgccgctcagatgttaacctcgaatcaatcttggatgacttcttcgacaacaatgttcctctccaccgtatacctttcgacgaacacgtcgaatacggacttcaatgcatggctgacgctttcaggccccctaggcccgctcgcccttgtcacctcaatgatgtcgaacatcattacccctataaatggcaagttaatgctgaagctcccttcgctacagacaagtatttcctcgacaatcgacacaaattccgagacttctacgatgaaacgaccggtacgtggaaacacgccgatcccatcgacatggaacgccgttatggcaatcgtctcgacacagtgttagatcaaatcacaccacccaaattcggatacatgaagaacgcgatcttcgcctggacccgacgctggcatcacatcattaaggacggttttaccgatcttactggcctagtgtcttctacttacgtccgcgaccgctttatcttcccgatgctccttcacacaaagactgcaatcgtcaagaaggatgatccaaacaagatgcgcaccatctggggctgttctaagccatggatcatcgctgaaacgatgctttactgggagtatatcgcttgggtcaagctcaatcccggcatcacaccgatgctctggggatatgagacgttcactggtggctggctgcggctcaacgctgcgctgttctcatccctaatgaagaacagtttcgtcacactagactggaaacgtttcgacaaacgagcttactttgaattgatttaccgcattatgttggttgctcgcacatttctcgacttcgagaacggttacgtacctaacgttaactactcggctactcacacagactggtcacataccaaagctcaacgcattcagcgtctttgggaatggacattggacaacctgttcaatgcaccgatcgtcttgccgaatggtgacatgtacaagagaaactgggctggaataccttccggtctatttatcacacaactcttggactcctggtacaactatgtaatgttggcaacactactctcagctttgggtcacgaccctaaggcttgcatcatcaaagtgcaaggagatgacagtgttatccgactcgccgtcctcatccctcctcagtaccacgaactttttttgactcgtcttcaagacctcgctgaccattattttggcgcagtgatttcaatcgaaaagtcagaagttcgaaacgaactgaacggagttgaagtcctctcgtataaacacattcacggtatgccttatcgcgatgaaatcgcaatgatggcacaactgtatcacacaaaggctaggaaccccgaaccctcgataacaatggcacaagccgttggtttcgcctacgctagctgtggtaatcacgatcgtgtttactatgcccttaaggacatatacgaatactacgcaagtcaaggttttgcacctaaccctgcaggcctaactttagttttcggcaactcaccagaccgattcgaactcgacgtaccgttggatcacttccccacgatacacgagatcaagaagtacctactgaactttgagtacaggaacgaacaccaagaacacaaaacttggccattagactatttcctcaacccaccgtgctcaacgctctga

SEQ ID NO: 1659 - DNA, 1791 bp, Rhizoctonia oryzae-sativae partitivirus 1
  source 1..1791: mol_type = other DNA
atgtttaacaacctcatcatcggtttcaaacctagtcttgctaaagctatcaaaggcaatattcaagacaatcaagttattgaagcctaccatcatgtcgttgaccacgccctctaccgtttcctcccacacagtgaagcccatgaaataattcatggatatcgtcgttccccatggaatgaagacgcactaaagaaggatattgatcgtttaaattcaatcgaacacaatgtttcgaaagatgaacactactggaaagctatttcctacgttaaaaagatctttactcccgaagtccctcttcgccctgtccatttcgccgatctccgtcattacccatggaaactatccactagtatcggagccccctttgcaactagcaaagaatggaactcatacgtagtccaaaaatttcacggctacaaagaaggatttgctgaatctactttcactaaatcttactaccgagatctattcgctgaagcgcacaaaggacaaagtctcgatccaccaatggttgatgctcgtatgtcaaagagaaatctttacaacgaaatgttctacactaacagaaagcatatacacaacatcaaggatggtcgcaccaccaatgatgctggacacgatcttcgttactggcacacagccttcgcacgacaacatttagtcaaagcggatgaagatgataaagttcgtctagtattcggcgccccatcaactagcctcatggctgaacttatgttcgtctggcccgtacaatcatggttactttccctcaaagagaagtcccccattttgtggccttacgttacactaactggcggttggcatcgttttgtcaatttcgcatctaagttctgtcctcaattcggtctagtactgactgttgactggcgcggttttgatcgctatgcgcgacacactgtcattcgtgacatacactcccatattctaagaccaatgtttacttttgaacacggatatcacccaacacaagattatccaaatactgaagaaacagatccccaacgtcttgaaaatttatggaactggatgtgtgactccatcttaaccactcccctcatgctacccgacggaacgctgatccgattccaacactctggaatcttttctggatattttcagactcagctcctcgactctgtatacaacttaatcatgttatttaccattctctctcgtctcggattcaaccttgacgatgtctatgcaaaagttcaaggtgatgattccatcatcttaatcgtttgctgtttccttatggtatcaaattggcttatcgaaatgtttcgttactacgctaagttctactttggagctatcttaaatgataagaaaactgaagtacaccctagcctcgaacacgtcgaaatgcttaaataccgtaatcgtggaggcatgccctaccgcgataggattgagctacttgctcaactcagacatcctgagcgtgcaataacataccaagcactcatggcccgagccgtaggtatcgcttacgcgaactgcggatcagaccccctggtttaccagatatgtgaagacattcatcagtatctctctaaacttggagtcaagcctgaccctgctggcttaccctctggcgttcgattcgtccaagattaccttcctggacaaacaacaatcgatgttcagagatttccaagttactttgagacttgttcccatctcctagacggatatgaagaacaaccttcccaaggttactggcctcgttctcactttatcggtatccccggtcgagcctga

SEQ ID NO: 1660 - DNA, 1791 bp, Rhizoctonia oryzae-sativae partitivirus 1
  source 1..1791: mol_type = other DNA
atgtttaacaacctcatcatcggcatcaaacgtagtcttgctaaagccatcaaaggcaatattcaagacaatcaagttattgaagcctatcaccatgtcgttgaccacgccctttaccgtttcctcccacacagtgaagcccatgaaataattcatggatatcgacgctcaccctggaatgaagacgcacttaagaaagatattgatcgtctcaattctccggaacaccccgtcccgaaagatgaacactactggaaagctatttcctacgttcagaagatctttacccatgaagtcccccttcaacccatccatttcgccgatctccgacattatccatggaaactctccactagtattggagccccatttgctaccagcaaagaatggaactcatacgtcgtcgaaaaatatcacggctatcaacaaggatttgaagaatcaactttcacaaaaccttattatcgagatctattttctgaagtacacaaaggacaaagtctagacccaccaatggttgatgctcgtatgtctaagagaaatctttacaacgagatgttttacattaacagaaagcatatacacaacatcaaagatggacgaaccaccaatgatgctggacacgatcttcgctactggcatacagcctttgctcgacaacacttagttagagcagaagatgaagataaagtacgtctagtattcggcgcaccatcaactagccttatggcagaattaatgtttgtttggcctatccaagcttggctactttcacttagtgaaaagtctccaatcctttggccctacgttacacttactggcggctggcatcgttttgtcaatttcgcaagtaaatactgtcctcaattcggcttagttttgactgttgactggcgcggttttgatcgctacgcgcgacacactgtcattcgtgacatacactcccatatcttaagacctatgtttaccttcgatagaggataccatcctactaaagattatccaaatactgaagaaacagatccccaacgtcttgaaaacttatggaactggatgtgtgactcaatcttaaccactcccctcatgctacccgacggaactatgatacgattccaacattccggaatcttttctggctatttccagacacagctcctcgactctgtatacaatttagttatgttatttaccatactctcacgtcttggtttcgacctcgacactgtctatgcaaaagttcaaggtgatgattccatcatcctgatcgtttgttccttcctaatgatatcaaattggcttatcgaaatgttccgacattacgcaaaggtctatttcggcgctgtcttaaatgacaagaaaaccgaaattcatcctagcctcgaacacgtcgaaatgctaaaatatcgcaaccgcggaggcatgccctaccgtgacaggattgaactacttgctcaactcagacatcctgagcgtgcaataacatatcaagcactcatggcccgagccgtaggtatcgcttatgcgaactgcggatcagaccccctggtttaccagatatgtgaagacattcaccagtatctctctaatcttggagtcaagcctgaccctgctggcttaccatctggcgtccgttttgtacaggactatcttcctggccaaaccaccattgacgttcagaggtttccaagttactttgagacctgttcccatctcctagacggatatgaagaacaaccttcccaaggttactggccccgttctcacttcatcggtattcccggtcgagcttga

SEQ ID NO: 1661 - DNA, 1869 bp, Rhizoctonia oryzae-sativae partitivirus 2
  source 1..1869: mol_type = other DNA
atggaatatctcaccgctgccttcaaccgtctgactaactggttcactggtccaaaaaaccttgaatacgtaggtcagtaccactaccaccctcacgctactctcgttaacgagcgtagtcttgaaatgcatcagaaggtgctacataaagcgtttatcaaatatctcaatgatacggaaatcgattttattgaaaataaaatgcgacgatccgacgttgatcaagatgcgatactcgcagatttcttcgctaacgatgtcgaagaccacaatatacctttcgatcaccacaccgaaaacggtctcaattgtatgctcgacgcttttcgtccgccacagaaatgcttacccgcacaccttaacgatgtagaacatcattatccttacaaatggcaggtcaatgctgaaccaccgttcagtactgacaagtacttccttgaaaataggcataaataccaagatttttgggatcgcgccaaacaacagtgggtcaattacgttgatccaatcgagattactcgacgatacgctggtcgtatcactgacgcactccttgagcaggttactcctgcaaaatttggttttatgaaaaatgcagtcttctcgtggactagacgctggcaccacatcattaaagatggctttgccaacctcactggtctagaatccgacgcttacgtccgagacaggttcattttccctatgttattacacacaaaaaccgcaatcgtcaagaaagacgaccccaataagatgcgaaccatctggggatgctccaaaccatgggtcatcgctgacaccatgttctactgggagtatattgcctggctgaaactcaatcctggcatctcaccgatgctctggggatacgagactttcactggtggctggtttcgattaaatcgagatctgttcatctcacacatgaagtcttcgttcttaacccttgactggagtcgtttcgacaaacgggcatacttctctctcattcagaaaatcatgtacggagtccgatcttacttagacttttctcgcggctatctcccgaatgtgaactatcctaataccgaacatgactggtcctcctcaaaagagatccgtcttgaacgactttggctctggactcttgaaaacctctttcaagctccaatcgtcttacctgacggccgaatgtacgtccgaaagttcgctggaattccatccggattatttatcactcaactgctggacagttggtacaattatacaatgcttgccactcttctttcagcattgggcttcgaccctagaacttgcatcatcaaagtgcaaggtgatgactcaatcatcagactaggtgtcctgataccacccaatgaacacgaactttttttgctcaagttgcaagaactcgccgaatattatttcaaagcgcagatctcccttgagaaatcagaagtccgaaactcgctgaatggttgcgaagtcttatcctatcgcaatcacaatggcttgccgtaccgtgatgagattcagatgctagctcagttttactacactaaagctagaaatccgagtcccgagataacaatggctcaagctgtaggcttcgccttcgcttcctgtgctaaccacaagcgtgtgcttctcgtccttgaagacgtctatttgcattacgcacaacaaggttacactcctaaccgagccgggttatcgctagtgtttggcaactcaccggacatagtgattcctcattatgagacagatcatttcccatctgtcgctgaaattcgtcagtacttgctcaactcgcactattctaacaccaaagcatcatcaaaaacgtggccgaaaaactactttttgcatgatccttgtgcgcgcccttga

SEQ ID NO: 1662 - DNA, 1863 bp, Rhizoctonia oryzae-sativae partitivirus 3
  source 1..1863: mol_type = other DNA
atggaatatctcgtccacgctttcaagatgttctctctcgagccttcggtctctcaaaatcttcaaatgattgggacctatcactacaagccggcttcgccacacgttcacacaccgcacgttgaggcacataaaaagacggttcttaaggccatggagaaatatctctacccacgtgaaatcaacactattgtcaacgagctccgccgctcagatgttaacctcgaatcaatcttggatgacttcttcgacaacaatgttcctcttcaccgtatacctttcgacgaacacgtcgaatatggacttcaatgcatggctgacgctttcaggccccctaggcccgctcgcccttgtcacctcaatgatgtcgaacatcattatccctataaatggcaagttaatgctgaagctcctttcgctacagacaagtatttcctcgacaatcgacacaaattccgagacttctacgatgaaacgaccggtacgtggaaacacgccgatcccatcgacatggaacgccgttatggcaatcgtctcgacacagtgttagatcaaatcacaccacccaaattcggatacatgaagaacgcgatcttcgcctggacccgacgctggcatcacatcattaaggatggttttaccgaccttactggcctagtgtcctctacctacgtccgcgaccgctttatcttcccgatgctccttcacacaaagactgcaatcgtcaagaaggatgattcaaacaagatgcgaaccatctggggctgctctaagccatggatcatcgctgaaacgatgctttactgggagtatatcgcttgggtcaagctcaatcccggcatcacaccgatgctctggggatatgagacgttcactggtggctggctgcggctcaacgctgcgctgttctcttccctgatgaagaacagtttcgtcacactagattggaaacgtttcgacaaacgagcttactttgaattgatttaccgcattatgttggttgctcgcacatttctcgacttcgagaacggttacgtacctaacgttaactactcggctactcacgcagattggtcacataccaaagctcaacgcattcagcgtctttgggaatggacattggacaacctgttcaatgcaccgatcgtcttgccgaatggtgacatgtacaagagaaactgggctggaataccttccggtctatttatcacacaactcttggactcttggtacaactatgtaatgttggcaacactactctcagctttgggttacgaccctaaggcttgcatcatcaaagtgcaaggagatgacagtgttatccgactcgccgtcctcatccctcctcagtaccacgaactttttttgactcgtcttcaagacctcgctgaccattattttggcgcagtgatttcaatcgaaaagtcagaagttcgaaacgaactgaacggagttgaagtcctttcgtataaacacattcacggtatgccttatcgcgatgaaatcgcaatgatggcacaactgtatcacacgaaagctaggaaccctgaaccctcgataacaatggcacaagccgttgggttcgcctacgctagttgtggtaatcacgatcgtgtttactatgccctcaaggacatatacgaatactacgcaagtcaaggttttgcacctaaccctgcaggcctaactttagttttcggcaactcaccagaccgattcgaactcgacgtaccgttggatcacttccccacgatacacgagatcaagaagtacctactgaactttgagtacaggaacgaacaccaagaacacaaaacttggccactagattatttcctcaacccaccgtgctcaacgctctga

SEQ ID NO: 1663 - DNA, 1854 bp, Rhizoctonia oryzae-sativae partitivirus 4
  source 1..1854: mol_type = other DNA
atggaatacgtcaagaaagtgctcaactatcttttcggcccgaaattcgaagaatacaacttcatcgagatcggtcgctactcccgccctccacacgtcccgacacaagatgacatgtctgttgaaaaacacaagattgtcatgatgaaatcaatgtcaaagtacctatataattgggaaatcgacgagattttaaattatcgacggacaacaactactgaagaggacatcgagcgtgactttttcgctggcaacgtcgaacctttcgacccgcccctcgaccacaacttcgaacttggactacaggatatgttagatgcattccgcccgccgcaacggtgccgcccatgtcacatcaatgatgtggaacaccactaccccttcaaatggcaggtgaatgccgaagctcctttttcaactgacgacttcttccttgataaccgtcccaagatcagcgaattagctgacacacgttttgcgttcttagaccaaaactacgttcaacgactgttatctaaacaaacaccggaaatgaacaatcctgtgcccgccaaatttggacccatgaggcacactgttttcaactggactcgtagatggcaccacgtcatcaaagacggattcgaagcacacgcacacttacgtgaatcggacccttacttcgagaaccactacatatttccgatgcttttacatgccaaaaccgcaatagtcaagaaagacgacccaaacaagatgcgaaccatctggggttgttcaaaaccttggattattgctgacgctatgctttactgggaatacatcgcttggatcaagctcaacattggatcaactccaatgctctggggctacgaaacgatgactggtggatggatgcgcttaaatgctgctctattctctagccacatgtccaagagttatctcaccctcgactggagccgctttgacaagcgtgcttactttaccatcatccgacggatcatgtttgggattctagactacctagatttcgaccacggctacgtgcctaatcgagactaccccgacacgtcaactgattggaacgaggacaaagcattccgaattctgcgactctggctttggacactcgacaacctgttcaacgctcccatcgtcctccccgacggtcgcatgttcaaacgtctctttgctggcattccttccggtttatttatcactcaactgcttgactcctggtacaattacacgatgatcgcaaccatcttgcgctcaatgggctacaacccaaagtcgtgtattatcaaggttcagggcgacgactccatcgtgcgcctcggacttctgatcaacccagatgagcacgaagagttccttcttaccatgcagaagacagctgaccactacttcaaatcagtgatctctgttgacaagagtgaaatcggaacaagcctaaacggccgtgaagtgctgagctaccgcaacaaaaatggcttcccctaccgggacgaagtcaaaatgctagctcaattctatcacaccaaagctcgcaagtcgacacccgaaatcgcaatggcacaagccatcgggttcgcttacgcatcgtgtggcaaccaccaacgcatactttcagttcttgaagatatgtatgaacactatgcagagcaaggctttacccccaatcccgctggactaaccatggtattcggaaactcacctgacaccgaacgcccgttcatcgagatggaccactttcctactgttgatgagatcaaacgatttctagtatgtactgactacagcaacgaagcacagaccaaacgcacctggcctttgtcttacttcgcctaccctcctgctggaagacccgaatga

SEQ ID NO: 1664 - DNA, 1842 bp, Rhizoctonia oryzae-sativae partitivirus 5
  source 1..1842: mol_type = other DNA
atggaaaacctcacttacgttagaactatccccgaaaccgagagaatgttacctaacaaatggaagattgccagtgaagctatgaaagccagaaacgaatggcttgagcgacaaatgcgcaaattctattccgacgacgaagttgatcaagttatgactaaccgacgatcagccgatagcgacgaagcacttatggaagatttcttccgcagcgaattctctagacatgagattcctgttgatgaatgtttcctcgttgccgttgagactgtgactgagcactttcgaccaaacagaatattacaccctgtgtcctaccctgatttaaggtattacccagcggagctttctgtttcagctgaacgaccgttcaccgacccctcttttcgatttaaaccaatggatcgagatgttgacgacgaaactggacaaccaaaagtttcgaagcctggctcacaagctaaacttcgtaaatggtccaaacacacagacgttaactcttacctaagatggaaacaatcgatcggacttatcgatgacgagaaagcatcatatcacaatctttataatgagattttcatatacaacagaccactcatccacatgatcaaagaaggagaagagcctttttggaaggatggtaaacccataccttatcaagagttgacacttcatatgcgatcacatgtcgtatcagcgaccgaacctgacaagattcgcgccgtttttggagcgcccaaacttctacttcacgccgagctcactttcatctggccgctacaagcgagctacttgaatggagattgcggacgaatgttatggggaagagaaatgaatcgcggaggatggagaaagctctatcacgaaatgttcagacatggacgaccaaagactattcttggtgttgactggagtcaatttgacaaacgacttcttcatcaactaatcaagattgttcacaacatttggagatcatatttcgacttttcaaaatacgagagcacttctacttatcccaatgcaaatccacgagaccctaggcgtatcgaacgactctgggaatggatgtgcaatgcgatcaccggaacacctatcctactaccaaacggacaagtttggaaatggaattggaacggatttggttctggatttcaacaaacacaactcatggatacttttgcaaacgccataatgatatacacttgcctactcgcaatgggggtgaatgtgcgttcaaaaagtttctgggcacgatttcagggcgatgattcaataagccatcgggttcgcttacacatcgtgtggcaaccaccaacgttcctaatcatgcttgaggaatgtgcacgacactacttcaatgcgaagctgaatgtcaagaaatcagcaatacaagacaaggtatcaggtatgttcgtacttggctatttcaataacaatggactagcttatcgtacggatgaggacctcctacgccacttaatgtttcccgagcgaccacaggactttggcagactggcagcatcagctgttggactggcccaagctagcatgggatgcagcccgagattttactctctatgtcttttcatatttgagaagatcgtacacgagaggcagatcccgatcaagtggaaggcattaaaatggatgattcgagctaacatcttcgagtctctggaccagcttaagacaactgagttcccgcgactgattgacttacaaatcagacgctatgccatgacaaatcgtacagaagaagaaaagcagcgccaatggccaacaagaccaaggacagacaacgcttctttttatttcttggatgatgtaactgcatcagtttga

SEQ ID NO: 1665 - DNA, 1749 bp, Rhizoctonia oryzae-sativae partitivirus 6
  source 1..1749: mol_type = other DNA
atgttttactccactatctccaaagtcaaaaccttcttcgcaaatttgtttgcgacagatcctcacggttttgtcaataatttcgagtttatcggttacgcatccgaccggattcgcgtctcgattccatctcgaaatgaatttcaatatgaacgatatcaacgtgtagtgcgccacgcattacgccgcaatcttcttggttatgatgctgaatacatcatcaacggataccaccacccccaagctaccctacaattcatggttgaagctttacgaaagggtgacctcccggatcacgttatacctaaggacgaacacttcctcgccgctttcacgcgcgctgctgaactatttcgccctcctgaacttatcaggcccgttcattttgcagatctccgcatgtataaatggaactggcatcccaacgtcgaagagcctttctactctgatgttgaactaattcgtgccgtatccatggccgccgaagccggcttgctccctgatgctcgcatgtcatttggtaacttacgtaacgtagtgttcatcaaaacgagaacatacttacaccaaatcaaacgtcgcgccatccgcaacccaggcactctctggcccccaatgaaaatacatgtcaagcccgcacttactaagaccgacgaaactaaagtccgtatcatctacggcgttagtaaaatgcacgtcctagcacaggccatgttcctttggccactgtttaactactatatcaatagcgatgatgacccactcctgtggggattcgaaactattctcggtggtatgcagaagctacacttgcaaatgtcgatcccacatctgtacttccaaaccttcgtcacagttgactggtctggctttgatctccgatcaatcttcagcctccaacgtgaagtgtttgatgtatggcgaacgtacttcgatttcgaacacggttacatcccgacaaagttctatcgagaatcagttgctgacccgcaacatctcgagaatctctgggaatggcaacgtgaagcatgttttaacatgcctttcatcatgcccgaccgtactatgtacaaccgccgctaccgatgtatcccttctgggctattctgcacacagtttctcgactcccacgtcaatatggtgatgatcctgacaattcttgatgctatgtcattcgacatatctcgcatcaaggtgtatgtacagggcgatgacagtctagtcatgctcgtatttcacattccagccgatcaacactccgagttcaaacgaaagtttgaagccttggcaaagtactactttgatcatattgcaagagatgagaaaactcacgtttctgaaacgcctcacggcgtcgaagttctcggttactccaataacaatggatatcccgaacgtgactggcgaaagctgcttgcccagctactccaccctcgaggagccctatccctcgagactctcgccgctcgctgctgcggtatcgcatatgcatcaatgtatcgataccctgaagtgatcaatgtttgtcaagacatctacaactacttggttacccgtcgcgccatcgtgccaggtgaacttagagctcaacgtgatgttatacttttcggcgaacatgaatttgaagtacctactgaccacttccccaccatgggtgaagtcactagatatcttcgtcaaccgtacgtcaggacacaagctgataaagacgactactggccttcaagccatttcctctccactcactag

SEQ ID NO: 1666 - DNA, 1020 bp, Rhizoctonia solani partitivirus 1
  source 1..1020: mol_type = other DNA
agatggaagcacagccaaggattgatcgaggactcagccgttagttttcacaacctatacaatgagattttctctgaaaataggtttcggatacatcaaatcaagaatggtgccaaagagttttggactgaaaagggagaacctatcccgtttcaacgtctaaaaatgcatttacgcacacatgttgttgattttgataaaccagataaggttagagccgttttcggcgcaccgaaattactaacaatggcagaattaatgttcatttggccacttcaagccagttatcaaaagaatctagacataggaaaaatgttttggaatcgagaaattggaaatggtggatggcaactattattgcaagagtttcacagctttacatcgaatacttatatttcgatggattggagcggattcgatcgtcgtcttttacatgagatgattgatgatgttcacggaatttggagatcatattttgatttctctagatatgaaccgacacaaatgtggaacgatacgactgtcaacgatcctgaaaggatcgaacgtctatggaaatggacgtgtcactcaatcaagcacacgccgattgagcttcccaacggacaagtttgggaatggacacacaacggatttggttccggttaccaacagacacaattgatggacactttttgcaatatgataatgacctatacggtacttctatcgttaggagtcaatgtacgaggaaagcattttaaatcacgatttcaaggtgatgatgctattcttgcgtttccagaacgcaagttccaaatgcatggaaaagactttctgacgcagatggccgataaggcaaagtattatttcaacgcaattttgagtgatgaaaagtcaacaattggatcacatccaaactcattgtacgcgctaggctatggcaaccgctatggtatggcttttcgtacgaatgaagacttactttcacacttaatgtttcctgaacgaccacaagacctaggaaggttagcagcgtcg

SEQ ID NO: 1667 - DNA, 1810 bp, Rhizoctonia solani partitivirus 1
  source 1..1810: mol_type = other DNA
aatgaagtttcaggtcttgaagaaccttgtttttcaagaacggattaagttagctagacgaccaggttttaacgcttgggaatggcccactgatcaaaaacttcgacgagacgaatggttactcaggatgatcagacgacgatatcttgaagccgacgttcagaagatgttgaccaacagacgctcacttggaactgatgaagcagttgtaaaagacttctttaccaacgagtttccaaagcaccacattgttcgagacgaacattatgaacgtgcactacgagtagtcgcagagcagatgaaaccgaacaggaccctacatcctgtcagctttcccgaccttagagcatatccagctacactcaatgtatcagctgaattgccatggactgacccaacttggaagttcacaccacagggacgagacgttgacgcggaaacaggacaaccacgagttcgattaccaaatcaaacaaagctacgcaagttcgcaaacggaacgacagtaccagcatatttgagatggaaacaagagcttgagctaatcaaggattcagatacttcatatcataatctctacaatgagattttcgatcttaatagaagactagtccaccaaatcaagcacggataccacccattttggaagaacggaaaacccgtaccttaccaaagactcaagttgcacttacgaacacatgtcgtatctgaggacaagccggacaaagttcgagctgtttttggagcaccgaaattgctacttcacacagagcttatgttcatttggccactgcaggcaacctaccagaacacagacgctggaaggttattctggggacgagagatcggccgcggaggatggaaacaattattgcatgagatgcacagccacacgcagaacacgtatatttcgatggattggagcggattcgaccgacgactcttacacgagttgatcaccgacgtccacaaaatctggaggacttattttgatttcacatcatatgagccaaccactagataccccaaccccgaagtcgacccagccacgatcgagaacatctggaactggatgactaacgctatactgcaaacgccaatcgagctaccgaacggagaagtttggtcttggaggcacaacggctttggatcaggataccaacagacgcaactgatggataccttttgcaatatgatcatgacttacacagtattgtctaaacttggagttgacattgaatcaccactattcaagtcacgctttcaaggcgacgacgcaattctcacattccctgaacccatgtactttatttatggacggaattttctgagtatgatgaagaaggaagcagagctttacttcaatgctaagttaagtgatgacaaatcaggaattggagatcacccaaactcactgtacgccctaggctacaacaatcgttatgggatgccctaccgaacagacgaggacctactgtcccatttgttctttcctgaaagaccgcaagactacggacgacttgccgcatcagcaatgggcttggctcacgcctcgctcggatgtagcaaacagttctacgacctttgtcaagacatctggaatgccatcgtcattgagaaacagatccagcccaactggaagcaactcaaatggatgaagcgcgccggaatggaagaggttttagagtcattgcagacaggagagttccctgagtacaacgatttgttagctgcaggaatcacaacagttgaaaggacagaacgcgagaagcagaaatcctggccaactattcctaaaggactaacaggc

SEQ ID NO: 1668 - DNA, 1863 bp, Rhizoctonia solani partitivirus 10
  source 1..1863: mol_type = other DNA
atggattacttgtcgaagaagctcgcttacttcaagaattttgcgaccaatatggacgtagaaaacttcgtacagcacgaaacgcccttcaacaacccacccgcacaaccacatatcaatgaaaccggaatcgaaaatcacaaacgtacgatgctcacatcaatggagagctatcttaccaacgaagaaatacatcggattacggtggagatgcgacgatcatctatcgacgcggagtctgttcagaacgacttcatgtccggcaatgtgccctatcacgagatacccgacgaccgtcatttagaggaaggcctcgatgcaatgtacttagcattcaagccacctcgcctcgccaaacctgcgcatcttatggatgtccagcatcactaccctttcaactggcaagtgaatgcagaacccccgttctcaacggacacctactacctagatcagcgcgaaacacttggtgaatttgtcgaacgccgcggatatgaacacatcaatgtcgacgattttatgcgacgacatggcatgcatctttcgaacccatccttcatcaatcagaaagtccctccaaaatttggatttctgaaagacaccattttcaactggacaaggagatggcatcacgtcatcaaatcaaggttcaccgatttagcaggcctacgtgctcatgactattatctcaaatcacgctacgtcttcccgatgttgctgcacacaaagacagcaatcgtcaaaagggatgacccgaataagatgcgaacgatttggggctgctcaaagccttggattatcgcagacaccatgttctactgggaatacatcgcctgggtaaaacagaaccgcggagccacaccaatgctctggggctatgaaacccacaccggcggatggatgcgactgaacgctgagctcaactctcggcttgctcgcaattcatttgttacccttgactggtcaagattcgacaagcgtgcatacttttggctgatcgctagaatcatgcagaaagtccgattgtttttggatttcagtaacggatacgttccgactgtctcctaccccgaacacttactctggggagaacatcagactgaccgactccaagccctctgggaatggacgctcgaatgcatctttgattctaagattgtactccctgacgggacaatgtggtcgagattatttgctggaattccttctggcctatacatcacacaactcctcgactcatggtacaattacacaatgatcgccacaattttaagtgctatggaactagacccaagacactgtatcatcaaagtccaaggtgacgattcaatcgttcgcctcggagtactgattccccgatcccaatgggatcacttcctcgagcttttcgaaaagctcgcgttgcaatacttcaacgccgtcgtttcgactgagaaatcggaaatcaggaaccaactgaatggatgtgaagtcctcagttatcgtaatgcgaacggattcccgtatcgcgacgaaatcaagatgttagcacagatgtaccatactaaggtccgagatccaacacccgaaattaccatggcccaagccatcggctacgcttacgctagctgtggcaaccacgaacgcgttctactcgttcttgaagaagtttacaattactacgcttctcaaggatacgaaccaaatcgtgccggcattacctcggtattcggaaactcaccagacctggaaccaatgaacgtcgatctgacacattttccaactctcaacgaaatcaaacgcttttcttgcaacatggaatacgaaagtgaatctttacgagccttttggccccgtgactactttacgtcttcaccatgctcttag

SEQ ID NO: 1669 - DNA, 1758 bp, Rhizoctonia solani partitivirus 11
  source 1..1758: mol_type = other DNA
atggaagcactgccacatctcatggacaaattgactttcaaagaacagactggtcacaacttcgtctttatcggaaagtatcatcgtaccatccctcgacacattgtatttgaacctaacatcgaacatcatcaaaagactgtccgacatgcaatggccaagtacttatacaaggaagagtatgaaatgatcatatacgactaccgtcgttcccgagctacagaagacgctatactagctgactttttcaatggcgacatcccgtatcgacagataccaaaggatgaacactactactacggactacatacaatgttagatctgtttcgaccgccagaaaaatgcagacctgtgcaccttctcgatttgatggacaaatatcctttcaaatggcaagtcaatgctgaagcacctttcagtactgacaaatacttcctgaagcaaatccctcctgggcacggcaacaaattcggtgacatgaagtacactatatttcagtggactcgtcgctggcatcacgtgatcaagagcggaatggatcctgaatctgcaggactcacagctacggacgtttatgcacgtaacaactacatattcccgatgctgcttcacaccaaaacagctatagtcaagcgagacgatcccgacaaaatgcggaccatctggggttgttccaaaccttggattcttgctgacgccatgttctactgggaatacatttcctgggtcaaacggaaccgtggagctacacctatgctctggggttacgagactctcaccggtggctggcttcgtcttaacgacgaactatactgttcacacttgcgacaatcctttataatgatcgattggaagcgttttgacaaatacgctcacttcgatctaatgcatgacatcatgtacggagtacgagattacctcgacttcgacaatggatacgttcccacaatcaattacccagaaccggagaaagattgggattcctttaaagctactagacttcaacgtttatggctctggactctcgataatcttttcaacgctccgattgttctgcctgatgggtcaatgtatcgacgcttgcattacggcatcccgtctggattgtacatcacacagctgctggattcttggtacaacacaagcatccttctgaccatacttagcgctatgggcttcaaagaaaatgaagtcttcattatcaaagtacaaggcgatgattctatcatccgtcttggtttactcatcgctaaatcaggtcacgctcgattcctcgagctgatgcagcactttgctgaccactacttcggttcgatcatctctatcgacaaatcaaagatgacgaacaatcttaacgaatgcgaagttctcagctattccaacttcaacggtatcccccgtcgtgatgaagtcaagatgttagcacaactctaccacacgaaggccaaatttccaactcctggccgaacgatggctcaatgcataggcttcgcctacgcatctatgggtcacaacattcgtgtacttaatgtgctacaagacgtcttcgaatattacaaacgtcaaggctactcctccgacaaacaaggattagacgacgtattcggcgactcacctgacatgaatctgccaaccttggacctcaatgagttcccaaaggtttcggatatccagaagtactaccttacttttgactatgtcaatgaagctgctctcaggcgcacctggcctgacgactacttcatgaggacgatttag

SEQ ID NO: 1670 - DNA, 1758 bp, Rhizoctonia solani partitivirus 13
  source 1..1758: mol_type = other DNA
atggaagcactaccacatctcctatcaaaattgacaatgtcagaagaaacgaattctaacttcgttttcatcggcaagtatcatcgcaacgcaccgcgtttcgaagtatacgaaccgaacatagctctacaccaaaagacagttctcaaggctctctctagatacatgtatcaagaggaagttcacagaatagtccatgagcaccgtcgttcagacgctagtcccgaagcaatcgaggctgacttcttcaacggtgatatacccgaccatcccgtccctaaagacgaacattaccaatatggtctcactactatgctcgatttattccgtcctcctgttcaatgcagacctgtacatatactcgatttatatgatagatatcctttcaagtggcaagtcaacgctgaagcacctttcagtactgacaaattcttccttcgacaagtacctcccggatcaagcggcaagttcggtgacatcaagtacactgtttttcagtggtcacgacgatggcatcacattatcaagaacggcctaatccctgacgacgcacatctacacaaagatgatccatacgccgccaatgattacatttttccgatgttacttcacactaaaacagcaatagttaaacgtgatgatcccgacaaaatgcggaccatctggggttgttcaaaaccttgggttctcgcagaagcaatgttctactgggaatatatcgcgtgggtcaaacgcaatcgcggagcaacaccaatgctctggggttatgagactctaaccggcggctggctacggctaaacgctgaactatactgttctacaatacgacaatccttcatcatgatcgactggaagcgctttgacaagtatgcgcttttttcagttattcgtgatatcatgcaaggagttcgaacgtttctgacgtttgaagaaggctacgtgcctacagtcaactaccctgagacggattccacctgggattcattcaagtctcttcgcctccaacggctatgggagtggactatacgtaacctcttcgaagcaccgatcgtcctaccagacggccgaatgtatcgacgactcttcgcaggtataccctccggattgtatattacacaacttctagattcatggtacaacaccacaatccttctcactatcctatcatccatgggattccgacgcaacgagatctttataatcaaagttcaaggcgatgattcaatcatccgacttggattcctaatctcaaagcccgggcacgctcgattcctcgagttgatgcaagagaaagcaacgtactatttcggatctatcatctcggttgaaaaatcgaagatggcaaatcgtcccaacgaatgcgaagttctgagctactccaatttcaacggtgtcccccaccgtgatgttgtccagatgctcgcgcaattctatcacacaaaggcaaagttccctactcctggccgtaccatggcacaggcagtcggattcgcttacgcctcgatgggtcacaaccctcgagttatgtgtgtatgccgcgacatttatgaatactatcaaaggcaaggagtcacacctgactctttaggcctcgaagatgtattcggcgacagccctgatattgaaaagccattcatcgacctcgatgaatttccatctgttgaaacgatccagaagttctatcttacttttgattatcgcaacgacaaacgtcttcaccgtacctggcccgaagactattttttacgtacgatttaa

SEQ ID NO: 1671 - DNA, 1863 bp, Rhizoctonia solani partitivirus 14
  source 1..1863: mol_type = other DNA
atggaagaactcatgttcatgattgaaaacctatctgtccaagaatccggataccggaacttgcgactcactggacgtcacgaacacagacatcacaaacctgatgtcaacaccaagtcaatccaaatgcatcaaaaggtgctcgaacacgcttttcgacaatttctcactcctgtggagatctcgtctatcattgacgattatcgccgcactgacgtcgactacgaagcaattatgaccgactttttcgcgaacaacgttccgaaacacgacataatattcgatcaacacctccaactaggcctgcaatgcatggccgatgcgtttcgtccccctcgccgggctagaccatgtcacttgaacgacgtagaacaccactacccgtacaaatggaacgtcaattcggaagctcctttttcgacagacaagtactttttagaccgtctacctacctaccgcgatttctgggacccgaccaccaaaacctggggccggcacattgacccgatcaaaatgatggaacgattcggagacaacccgaccgacgaacaactcgacacgcagacacctgcgaaattcggtttccaaaagtctcaaatcttttcatacgttagaagatggcaccacatcatcaaggacgatttcaaatcaaccaccggccttgacaacccgtcatacttcaaagatcgctacatatttccgatgatcctacacaccaagactgctatagtcaagagatctgatcccaacaagatgcgtaccatctggggctgctctaaagtatgggttatcgctgaaacaatgctctactgggagtacatcgcctgggtcaaaaagaaccgaggctgcacaccaatgctatggggtttcgaaacattcacttctggatggcttcgactcaacaacaccctgtacaactctctgatgcgtaacagttttatcaccctagactggaaacgtttcgacaaacgagcatacttccctctgatcctgcacatcatgtggacgatccgcgacttcttagatttcgataacggatactgtcccaatgtcaactacccaacaaccgcctggaattggaatcaatccaaatccgagcgcatccaacgcctttggctctggacgttagactgccttttcaactcggcaatcatcacgcccgacggatggctctacattcggttacacgctggcattccatcaggattatttattacacaacttctcgattcatggtataactacaccatgatcgctacactcctttccgcaattgggctagacccaaagcgctgtatcatcaaagtacaaggcgacgacagtgtcgttcgcttatatgtgattatccctcccgatatgcacgatgcttttttggctgaactacaacgtctcgcagaccactactttcgctcagtgatctcgatggaaaagtctgaagtgcgtaacacgcttaatggcgtagaggtactttcgtaccgcaactgtaacggttacccataccgcgatgagctcaagatgctcgcacagttctactacaccaaagcacgtaacccaagcccttccctcacaatggctgccgccattggattcgctttcgcagcttgtggcaatcaccctcgcgtacatatggtactcgaagatgtttacaaccactacaagcttcaaggttacacacccaacgctgctggactcaatcacgttttcggagactctcctgaccgtgcaagtatccacattcctctcgatcacttccctgacctctcggaagtacgtgcaagtttgctaaactacaatcataacttcgaagtaacagaccaacgaacctggcctctcgactacttcttgtttgacgcttgtaagtaa

SEQ ID NO: 1672 - DNA, 1770 bp, Rhizoctonia solani partitivirus 15
  source 1..1770: mol_type = other DNA
atggattcactcctcacatccctatcccaattatcgattaactcaaatcttgagtttatcggatacgaccctcatcacggctcagtaccccagatgaacaagtcccacaacgactggttcttcgcctgccgcgcattagttgtatcaacaatatgcatgtacgccttcttcttcaatctacagaccgttcaacgcgttctctatgattacagaagacctcaccctacccctgagaaagctgaagaattctttcttcgctacgacgtcaacaaacaccaaatattgaaagacgagcactactggaaagcgctcttaatcgttaccgaatggttccgccctagatggaaaatacatcctgtccacttcactgacttacgttggtatccctggaacaagaacacatctgccgagcgaccttttacgactgagcccttttacaagacctacgtccaatattggtttaagcaaaactggttactagatggcaagctctccttccggaatcttgaaaaccacatctggttacgcatccgccccatgcttcaccgcatcaaacgtggactcacagttgctatcccacccatcactttacacgtgaaacccgccctcgtcttcgacatcgttgacaaggtacgcaccgtctttggtgtctctaaactggttatcttcatcgaagctatgtttttctggcccctattttctcactattttactatatgcaaaactcctctcctatggaactatgaatctctcaacggaggctggcaccgactcaacgccgagtaccgctcccgctatacttcattcaaacccgtgttcaaccttgactggtccgaatacgatatgcacatctactttgacatgtggaaagactgcttcgacagcgtctcttcctatttctgtttctgtggctgttactgccccaccaaccctggtgttgcccaaggatctggataccccaaacctcgcacaaaacccgagtacatcttcaatctctggaaatggatttggaccgcctacacaagtatgctttgtatctctcccactggtaaagtcttcaaacgacttttcgctggtatgccctctggtatattctgcacccaattctgggactccttctacaattgcgtaatggttgtcacaatcttactctctctaggatatgaaattcaccctgaccactttcttaaagtcatgggcgatgatgttctgtttggattattgacgatgatccccatctctgaatgggccgagttcctcgacgcctttgctgacgaagcaaaacgacgattcaacatgaaactcagtccttcgaaatgtggagcatccgaaaccatccaaggcgcaagcgtcttgagttactctaacaacaacggttggcccgttcgtgacccggaaaccctcctggcccaactcctcaaccctaagagtctcaaagacactttccctcgcctgatggcccgcgcaatcggaatttactacgcgtctgctggttcacccaagctacgcccgatctgcaaacacatttacgatgaactgaaacatcaaggatttgaaccacaccatcgcgttatctacgagatgtttggtcatttacctgaaaccgtcagcttcattagcttagaccacttcccttccgaagtagaggtcctctcccggatctcccgaccttctggacgaagtgacgagcttcaatcgcaatactggaatcgagaacacttcattttcgaatctggtcttgcacctcactgcgacgagatgactaattag

SEQ ID NO: 1673 - DNA, 1872 bp, Rhizoctonia solani partitivirus 2
  source 1..1872: mol_type = other DNA
atgaatttgtacaaccgtgtctccgcactttttgcaaactggttttcttcaccgtcaaatctcgagtttgtcggctcttaccatcaccaatcgggaacggtcccaccgaacccctctacgcaagaagctcacaaacgctttctacacaatgttttcaagcagcacctcttcacttacgaactcgattatatcgagaatgaacaccgccgctctgaagctacacctgaagcgattgaaaatgactttttcgccaatgatgttgagccccatgacataccgttcgacgtacacgttgaaattggtttacaatgcatgaccgacgcgttccgccctcctgttccttgcctccccgcacatcttaacgatgtcgaacatcattacccatttaagtggcaagtcaacgcagaacctccgttttcaacagattcttatttcctcgacaatcgcaaattgttcagcgactactacgacaccgagtctcaaacttggcgtggttacgttgacccgtttgaagccaatcgtcgatatcagcacactaaagacaaggaaggttttctcaaccaaaccgtccctgctaagttcggctttatgaaggacacaatcttcagctggacccgccgctggcatcacatcatcaaagaaggctttcaaaccgctacgaatttgtcatctaccgcatatttacgcgatagatttatctttcctatgttattgcatactaaaacagcaatcgtcaaaaaggacgaccccgacaagatgcgcaccatctggggctgcagcaaaccatggatcatcgccgacacgatgttctactgggaatacatagcttggatcaaaaagcaccctggcgtcacaccgatgctctggggttacgaaaccatgactggtggatggatgcgactcaactcgcaactattctcttcgtacctcaagaagtcctacgttacccttgactggtcacgcttcgacaaacgtgcttatttcaaacttatcctcgctatcatgtgccgcgttcgtaccttcctcgactttgacaatggctatctcccgaatgtcaactaccctgacactcgcaccgattggtctccaaacaaggcccaaagacttgaacgtctctggctctggaccctcgaatgcctaatcaagtctccaattgttctaccagacggtagaatgtatatacgacactatgctggtataccttccggactattcatcactcaacttctggactcatggtataattacactatgatatgcactatcctttcttccatcggactgaaccccaaacactgtatcatcaaggtacaaggcgacgactcaatcgtccgcttgggcgttctcattccacctgaggctcacgaagcctttttgctcgcattgcaatctaaagcagatttctacttcaaagcgatcatatcagtggacaaatccgaattgggcaactctctcaataatcgagaagtcttgtcttaccgcaactacaacggtttaccccgtcgcgatgagattaagatgttagctcaattttatcacacgaaagcacgcaaccctacgcctgaaatcgcaatggcacaagccgttggattcgcgtacgctagttgtggcacgcatcaacgcgttctcgacgcactcgagcacgtctatactgactacaaagatgctggctacacgcctaaccgcgctggactgtctctggtgtttggcaattcgcctgacatccaacttccacactacgatatcgatcacttcccatcaatagaagagatcaagcgcttcctgacatgcaactcttacgataatagcgttcagatggccaaatcatggcccaaatcctatttcatttctgaaccctgtgagagaatgtga

SEQ ID NO: 1674 - DNA, 2403 bp, Rhizoctonia solani partitivirus 433
  source 1..2403: mol_type = other DNA
atggcgaaggctattgaagattttattctaagatcatacagattgaaagtctgtcctaatcaattgcgccctactgtgactctatttaccatagaccgaatttcacatatggtattaattctcgacttatccaaccgagttttctattcactccacgtaacaacctacgttacactgagactacttcttcgtttccaaattaagaaacgtcaaaatcgcacacacacacaactgcgataccctatccgaaatatctatttcgaatggactttaagaagaagttctcccaaagatcaacctccaacgatcttcgtttatgagaaatctatactctcatacattgatcttgctacaagcaagaaaatcgaagaccaattagagaattcaaccctctctattcttgagcattactctgccaggaatgaagacttctctatctatgaggaaatctcacaaaccgatgtacccgaagaccgacttcccgcttctggaatcaaactgtcattacgaagatatcactcaatcccatcttcaacactacatgatgaacagcgaccccagatcattatcaacgacccttattttgttgaaaccccggacttcagatctaacatcgtatattctgaggaaactgacctctctggatcccctcccgttccagaaatactgtcaattatccaagaatggttcccatcatatctaaaacatttggacgaactatgccgaccccccagctatggtcctcaagcctttcaagactttaacagaccaactcccaacccggctccacctccaaaagaacgacatgatacaatcattcgaatcatactcttgaaaatggctattaagccatacagaccgatacacttcgcggacactctcgcaggtgatcaacccctgattacatcagcgtcatacttctcaaagtttgacccacattcaagaatttatgcaagatactctgccccttctctttatcgtgatcgaccaacttcaaaaggatatttccttaatgttgtactcaatcaattcagaagagaactccacaacgtcaaagactcaatatcgccgtactctggcattattgatgaatttgaaatcccacacgctaacgaactctggttcgccaagcacccagctcaactctttatccgaacgcaaatttcaaaacgcgctcccgatcaaccaaagaaaatccgacctgtctactccgtagacgaccgcttcctaacgatcgaaaagatgttaacactccccgctcttgcccagcttcgcaatccacaatcatgcgtcgcacatggacttgaaacatttcgtggctcaatgcagcaactaaatcttgttttctactactacgctagtttcatatcaatcgactggtcccaattcgaccaaagactaccctcctatgttatacttagcttcttcctcgactatctcccccaactattaatcatttcacatggttatatgccaactagacaatacccagactcaactcaaccaaaacacatttttgcgaataaaatatttaatatattaatattcatgctacaattctacctaaatatgacttttctgtcttacgacggatttgcctacattagagaacatggtggcgtaccctccggtgcgcttaacactcagcatctcgattctttcggcaatatgtacgttatctgtgattgtttacttgaatttggcttcaccgaacaagaatgcctgcaaatgctattctgcgttatgggcgatgacaaccttatcttcatgcaagataacatcgcaaaagtaactgcctttatgacatttctcgagcattattgtgaaaccaaacatggtatggtcctatctatactgaaaagcgcattttcgcacctgagaaacaagctaacatttctctcctatgacaacgacgacggacatccgactcgttctatttctaagcttgttgcccagcttgcacttcctgagcgtcccatcaaccctgaacgcaaatggatacactctgcccgcgctcttggacttgcttttgcatcctgtggccaggatcaaacgttccacttactctgtaagatggtatacgaaaagttcaaaccctctggacccgtaccctccgagcatattatgaagacattcaagaaatggaagttccaacttcctgagttcgatattcagacccctgaatatgaatttcccacctttccaacttgtgcggaaattcgacaccgactcaatttctatgaaggctttctttcagaagccgacaaatggaatgacttcgtattcactgtgcccccctccgacaatctaacagattacgtcaccctaaaagaatacattgatactgatgctaacatgcaacttatcatctctaaattctggcaaggttttcgtaccttatga

SEQ ID NO: 1675 - DNA, 2274 bp, Rhizoctonia solani partitivirus 6
  source 1..2274: mol_type = other DNA
atgcacacattcttcacatgcggccttttttactacttcatccgcgtttggcgcttcaaaaccaaacacaaaaagtttgacctgcgattttataatcagcttcgtaatattcatttcgaataccgcgaccgtctaacttcaggacctgacgaaccacccttcgtttatagtaaatccatcctcacaatcatcgataaagtgatagccacccgctacgctcaacatcatgacgacatcattgatggaatccgctctcacagaatatctattgcccacggccctctcggactctacgaccccgtagactacgatgacatccctgagctacgcctgccaaaacctggcatcctggtactaccttttcgctaccacgaaaagtctcctggtataggctatacttctgttggtgaacgactgttaaccaatgacccaagtgcagcagaagaaccactcgaccgaaaggccgaaacttacattgtagacaccgatctctctggctttcccccgaatccagaaattgtccacattattcactattggttccctcagtatctcgaacacctcgaatactattgccgcccttattcatttggtccccaagccttctacgattttaatcgtacaactgaaaggaagccccctccctccaaagaacgagaagacgaaatactctcaatcctcgacgagcttttcaacatcaagccctatcgtcccatccatttcgccgaaactctcgcatctggcattcctctcaatacttcagcccccttcgctgaaaaacatgatccagaatcgatcgccctcgcaagatggaattctccctctgagtacgctgaccgtcccacatccaaaggacacttcgtcaactcaatactcacattcggacgccgaatcctccacaacgtcaaagagactggcacaccaaacgccgactcactatccgacgcactcatcccagattccgacgccaattcccgactacagaatttcttccttcgcaatccgaccgaactcttcatccgcacccaaatttcgaaacgcgaccccaacgagcccaagaaaatacgcccagtatactcagtctgcttgcttttcattctttttgaaatcatgctaacttatccgctcctcgcccaactccgaaatcccgagtgttgcgtccttcatggacttgaaacattccgcggctccatgcacgttattgactactgcgcacaacagtatcaatcctacgtctccctcgattggtcacaattcgatcaacgacttccgatctatgttattattgcttatttcacgcgctttctaccgagacgcatcgttataaacaaaggctacaccccctcccactcttaccccgacacacgttttagtaatcccgacatctttgctatcaaaatattcaacctgttgcaatttgtcttgttatggtatttaaatatggttttcatctcatttgatggttatgcatatgtccgcctcaacggtggagttccctctggtcttttgaacactcagtcaattgattcatttggtaatgcttacataatcgtcgattgtatgttagaattcggcttctcaaagtccgaaatcctcgacatgctcttcttcatcatgggtgatgacaatatatttttcgctcgacagaacatcaatcgtattcacgatttcatgaagttcctcgactcctacgcgaaagatcgacacggtatggttctctccatactcaagtctacctacacaatgcttcgaagcaaaatcgaagtactcggatacactaacaactttggcatgccaactcgccccatcggcaagcttgtagcacaactcgccttccctgaacgtcccgtacccgacgacaaacagtggatgcacgctgctcgagccctcggcttagcctacgcttcttgcgcacaagatgcgacatttcatttactttgtcgcgaagtgtacaacaagttcaaaccatctggccccgtttccacggcacagataaaaagagtattcaagtacaccgtttctgatctcttcgaagatgacctcacctccgagctgttcgttttccccgatttcccaactttgtatgaagtcaagtcattgcttgatcactatcacggattcttttccgaaactgacaagtggcagaaagcaatattctctgacatcccacacgtctccgacgacgatgtagttacccttgaaacatggctagcttcgcacccgaactaccaattcaggactgaccacataatgcaaggatcaactgccccctaa

SEQ ID NO: 1676 - DNA, 2202 bp, Rhizoctonia solani partitivirus 7
  source 1..2202: mol_type = other DNA
atgtctcactatcagatccctccgtacgacattccccctgtcctcgctgaaatcgacttcgagtctcagaatcctgatactcaacgatatcgcgacctcctggaatcttaccgtctttcgccaactgaacacaaccttcaagcgatccgtgactacgtctcccatcatgactttacctatttccaaccaactggtctctcagtcatgcccgacaatcgcgctcctgctgctggtattcgcgcaatccccgaattcatttttcatcctgttgccgctctccgttcatatgcaaatatccctcgcactggtctcaaccccctctggaatattgctaatattattggcacttacttctgttccctaaccgtcgtccttctgaactactgccgccctgctggcaattccgaagctatattcgaaaacttcaaccaacccgtgactcccgtcgctgatgttgctcctgatcgtctcgaatccattatgaatctgatcttctttttcctcccgattgtaccctatatgccaatcaacttccctgatctccgtttctacaaatggtctctcgtcacctccgctgactatcatgctcataactctactgacatgaaagaagaaagcgctcgttactggtcccaccttaaagaaaacgaccttcttgaagaacgttttgactactcaataaacccaagaagcaaaggctttttcttcaactctctccttctgagatgtcgacgaattgtacataacatcaaatacactggatggcctatccctccaaatgaaaaagaaacccaacaatccttctttcaacgtatgttctactggtctatgatgaaccctactgtcatgtatgtccgttctcaaatatcaaaacttactaagctgaaagttcgtcccgtctacaatgctcctatgcttttccttatgctcgaagctatgctcaccctcggtcttatggctcaatgccgcaaagacgacaactgcatactttggggttacgaaaccattcgtggtggcatgcaaaggctcaacgaaatctcacaagagttcaacaccttcatgggttttgattactctcgatttgatcaactcgcgccatttacagtcatctaccacttctgggctacattcctacctcgaattatccgtgtcgatcgtggctaccaagagtccacaatttatacaaagacccaatacgactatgatttcgacaaaaagtacgacaatcttgacgcatcctccgctgaattcaaggcctttcactcaagtcttgactctcattataagcgcagtgttatcacattcgcgtttgttatcacgaacatcctcaagttcgtttggtggtggtacgttatgatggtcttcatcactcccgatggctacggtttcgtccgcttactcgctggcgttccctcaggcattttcatgacgcaaattcttgattcctttgtcaacctctttcttttcatcgactcactccttgagttcggctttacgccagatgaaatcaaatgtttcagactttttatccaaggtgatgacaatctcgtcttctacctcgggaatcttgaacgcatcttcgaattttacgaatggtaccctacctacgtaaacgaacgatggcacatggacgtctccatcgagaaatcatggattactcgtcttcgctcgaagatcgaagtccttggttacaccaatctcaatggtatgccccgccgtgacatggccaaacttgtcgcgactctagcttaccctgaacgtaccgttcttgaaaagaatcgatatccaattctgatgtcccgcgcaatcggcatcgcttacgcaaacgctggtgcagactaccaagtccaccgtctctgcgaattcgcctacctcgacgcccgacagaaatctggtctctctgaagaacaactcagagaaatcactatcccctatcagaagcttggattttacgagatattctccgttaacctcgaagagctattccctgtgctcttgaagaatctcgatcgttttccatcttttcatgaaatccgcgataaccttcgcacctggcatggtccgcacgacgtctacccgatgtggccgagacagtttaacaaccgtcccgatcatattgatcctgacgacacagtcatcactctggctgacgtgctcaagactgccaacgtggtaattcctaaacttcatgagactctctaa

SEQ ID NO: 1677 - DNA, 2121 bp, Rhizoctonia solani partitivirus 8
  source 1..2121: mol_type = other DNA
atggttttcgatactgtacgtaactacttacacgagctacgcacaactttaactaaggaatggtccctctcaaacaaatttggatctactactgtaaatccctcttcctctgaaccagacgccgatctccgacgccttcagactacttttagaaacctcgacattgaaaaatatttaaccaatgaatatcatcaacacgcaactgacctctactttggtctacttgaatccgatcatatgaaagatgaacctttcgagttctacactcacattgacacttcaattgtcccccaatcccgacaacccaaccctggaatcaaattacttccaataaaaatgcaccgcgatcaaatcgtttctgcaacattgaaagtccccgaatccggttttaacgtcgatccacctatctataatcttctactgaatgattatcctagatatcttccttacatcaagaaatactgccgcccccttggtactactgacgctacattcacagactttaatcgtgaacaagtcaaataccctgacattcccaacgatctgatacttcaaattgttagaattgttacaaccctacttggcgcaaaacctttccgtccactacattggatagatacgtatttcactggaatgcctcttcacacaggtgtctcttacttttacagacactcgtatgatatgaagacccacgctgccttcgcagctaataaagattatgaacacaaacaaacctctaaaggttacatgttcaatacttttgcacaatggtcccgaactgtcgtacatcacattaaagagtttgcacttccattcaacccatcgaaactaaccccccccgaaattaaagccaaactggctgaattcttcattcgacacgcaactatgttgtttactcgaaaccacatctctgaccgagacggtatcttaaaacaaagacccgtttacgcgatggatacactttttctacatattgaatgcatgcttacattcccgcttcattgcatggcaagatcaacttcttccgcaatcatgtactcaatggaaactatccgtggaggatgcgcacgtatgtcgcaactttccatgaattttagttcttttctatgtattgactggtccgcatttgatcaacgaatgccctggattatagttgacacattctttactaaatttttaccttctttaattgttatcaatcaaggataccacgcaactgctgaatatcctacttatcccgatttaacttctgagaagctattcacaagaattcttaatttaatttcatttctacgcctttggtactacaactgcgtatttgtcaccgctgacggatatgcctacgttcgacaatttgctggaatcgcttccggtatgctgaacacccagtaccttgattcgtattgtaatctattcctaatgatacacgcattaattcacttcggatgctctgaacaagagatattcgatataatgtttttcgttatgggagatgataatgttatcctcactcactgggatgcattacgcctcactagattcatgtcgtactttgaacaacacgcactttccagatttggaatggtcctttcaaagacaaaatcaattataacgacattacgatacaaaatcgaaatgcttggatacacctgcaataacggtaatccaaaaaggccgctaggaaaattagtcgcacaactttgctaccccgagcatggcatcaagcctaaataccaatctgcacgcgcaattggcatggcctgggccgctgctggtatggatcccacttttcatacattctgccgagatatctatctcttatacttaagagaagctgaaatcccagatgctgaaaatactcaaatgatcctcaagcacatgcctggcatgtttaaaatgctagacgacgctcaagagttgttcgctgatctacgatttcctaagattcaggaagtacgagaacgctacgccaaatggcaaggcgaacttgacctcaataagaaatggtcacccgtacactttctaaatccaccagatttcgtcactgatcaccccatgactgtacaagattggatgtccgaacacaacattcattttaaagacgttgaacgtctattatag

SEQ ID NO: 1678 - DNA, 2271 bp, Rhizoctonia solani partitivirus 9
  source 1..2271: mol_type = other DNA
atgcttacattctacactaccgcaatattttgctactttatacgtgtttggaaatttaaaacgaaacataaaaaatttgatctacgatattataaccaaattagaaatatctacatcgaatacaagttccgtgaatcctcacaccttgacgatccccccttcgtctatagcaaatccatcctcacaattatggataaagtgatagccacccgctacgctcaacaccatgatgacatcttagatggaatccgcgaacacagaatcacacgagatcttcccttaggactatacgaccttatcgaatactccgacatccccgatctccgccttccaaaacctggaatccttgtgctacctattcgttatcacgaaaagtcacctggtataggctacacttctgttggtgaacgactgttaaccaatgagcccgacgcagctgaagagccactcgaccgaaaggccgaaacttacatcgttgacctcgacttatcaggctttcctccgaatcctgaaattgttcagatcatctactactggttcccacaatatctagtacatctagactattactgccgtccctactcatttggcccccaagccttctacgattttaatcgtacgacagatcgcatgcccccaccctcctacgaacgagaaactcaaatccttgaacttattgactctttcttcaatatcaagccctatcagccaattcacttcgctgaaactctcgcttccggcatccctctttcaacctcagctcccttcgctgagaaacatgatcccgaatcgatcgccctggcaagatggaattctccctcaatctacgcaagccgcccttcatccaaaggacacttcattaactccatccttacttttggacgccgaattttgcacaacatcaaagaaactggaaccccaaacggtgacccactcctggacgcccttctcccagattcagacgcaaactctcgccttcaaaactttttcatcaggaatccgaccgaactattcatccgcacgcaaatcagtaaacgtgatccctccgaacccaagaaaatccgacctgtatactcagtttgtctacttttcatcttattcgaaattatgcttacttatcctttgctcgctcaacttcgcaatcccgaatgctgtgttcttcacggcctcgagaccttccgtggaagtatgaacgttatcgactccgtcgctatggcattcacttcttacgtatccctagactggtcacaatttgatcaacgtcttccgatctatgttataatcacttattacacgcgctttcttccgagacgcattgtcataaacaaaggctacaccccctcacactcttaccccgatacccgttttagtaatatggacactttcgctattaaaatttttaatttgcttcagttcctactcctatggtatttaaatatggtattcatttcctatgatggttatgcttacgtccgcctcaacggtggagtaccttctggtctattgaacactcagtctctagattcttttggtaacctgtacataatcatagattcaatgctcgaatttggcttcaccaagtcagaaattctcgacatgatcttcttcataatgggcgatgacaacatatttttcgcacgaatggaattcaatcgcatctgcgatttcatgaaattcctcgactcttacgcgaaaacaagacatggcatggttttatccatcctcaagtctacatttacccgccttcgaagcaaaatcgaagtactaggatacactaacaactttggcaaaccgacccgcccaattggcaaactcgttgctcaactcgccttcccagaacgtcccgttcctgaagacaagcaatggttacacgccgcacgcgccctcggcctcgcctacgcttcctgtgctcaaaatgctacattccactccctgtgttatgaagtatacaagaagtttaaaccatcagagcccgttccctcggctcagataaaaagagtattcaagtacactgtctcagaactcttcgaatttgaacttgacaccgaaatgttcacattccccgacttccccagcctgtacgacatcagcaatatgctcaaccattatcatggcttcttctccgaagaagacaagtggcagagaaacatatttgcagatgcaccgcatgtctctactgacaacgctgttaccttagaacaatggctagcctcgcacccgagctaccagttcaagactgaccacgtaatgcaaggatcaactgccccctag

SEQ ID NO: 1679 - DNA, 1854 bp, Rhizoctonia solani partitivirus virus 3
  source 1..1854: mol_type = other DNA
atggaatacatcaacagagttctgtcatatattttcaaacccaaattcgaagaatacaacttcatcgaggttggaagatattcacgccctccacacgtccctactcaggacacgctttcaattgaaaagcaccaaaatgtgatgatgcactcgatgcgaaagtacctttacccttgggaaatcgaacaaatcgaatcatatcgtcgcactaccacgtctgagtccgacatcgagcgtgacttcttcaccggcaatgtcgaacatttcgacccgccactcgacgaaaatttcgagctaggtttggctgacatgctggacgcgttccgaccgccacaaaagtgtcgcccctgtcacatcaatgacatcgagcaccactaccccttcaaatggcaagtcaacgctgaagcaccattctctacagatgattacttccttgacaatcgtcctaagatcagcgaattagctgactctaaatacgcgtttctcgaccagagatacgtcgatcgacttttgtctaaacaaacatcggaaatgaataatcctgtcccggcaaagttcggcccaatgcgacacactgtgttcaactggacccgacgttggcaccacgtcatcaaagacggcttcgagcgccatgcccacctcaaggacaacgatccgtactttcagaataagtacatcttcccgatgctcctacatgccaaaacagcaatcgtcaagaaagacgaccccaataagatgagaaccatctggggatgttccaaaccatggatcattgctgacgcgatgctttactgggaatatatcgcttggatcaaactcaaccctgggctcacacctatgctctggggctatgagacaatcactggtggatggatgcggcttaacgctgctctgttcagtagttacttgaacaagtgttacctcactttggattggagccgcttcgacaagcgagcttacttctccatcattcgcaggatcatgttcggaattcttacttacctagatttcgacaacggttacgttccaaacgtcaactatcctgatacgaaaagtgattggtcccacctcaaatcgcaacgcatactacgcctctggctttggacactcgacaatctgttcaacgccccaatcgtcctacctgacggtagaatgtacaagcgtctgtttgctggcataccttccggtctttttattactcaactcctcgactcgtggtacaactacaccatgatcgcgacgatcctacgagctatgggtttcaacccacgccaatgcatcatcaaagtgcaaggcgacgactcaatcgtccgactctacgtgctaataccaccagccaagcacgaggacttccttcttcgcatgcaagagttggcggatcactacttcaaatcggtgatttccgtagataaaagtgagatcggttcaagccttaatggtcgtgaagttctgagctatcgcaacaagaatggttttccattccgcgatgagatcaagatgatcgctcagttctaccacaccaaggcacgtaaatctacacccgagatagcaatggcacaagcaatcggcttcgcctacgctagctgcggcaaccacgaccgtgtgttgtccgtcctcgaggatatgtatgatcactacctgtctcaaggttacagtcccaaccccgctgggctgacgatggtattcggaaactctccggacaccgaacgtccgttcatcgacatggaccacttcccctctatctcagaaattaaacgatttctagtgtgcactgactaccgcaatgatgtacagtctcgccgtacctggcctccagactactttctacatcctcctgcctgcaagcctgaatga

SEQ ID NO: 1680 - DNA, 1875 bp, Rhizoctonia solani partitivirus virus 4
  source 1..1875: mol_type = other DNA
atggaatatctcaccgccgccttcaaccgcatcacttcctactttgtagggaccaaaaatctcgaatttgtcggtacctatcaccaccgaccatctcacccgcccgtgaatcctagtacacttgaagctcatcaacgcgttctgtttaacagcatgaaactatatttgaatgacttcgaaattaagtacatcacgcaagagcaccgacgatctgaagtttcagaagacgctgttttagctgactttttcgctggagacattgagaaccacgagatacccttcgatgaacacgtcgaacaaggactacaagctatgaccgaggccttacgcccgccgaacaaatgtagacccgttcacatactcgacgttaaggatcgatacccgtataaatggcatgtcaattcggaaccaccgttttcgacagatgaatatttcctcagtaaccgcaagctttttgccgacttttgggaccccgtttcccagacgttcgaaaagtacgtcgatccgctcgacgccatgcgaagatacggtaacaagatcgtggaaaacctcctcccgaacgtcactcctgcaaaattcggatttcaaaaatctgcaattttctcttggacacgtcgatggcaccacatcatcaaatctggctttacagacctaactggcctggaatccactgcctatttgaaagaccgtttcatcttcccgatgttactgcacaccaaaaccgctatagttaagaaagacgatcctaataagatgcgcactatttggggctgttccaaaccctggattatcgcagacacaatgttttattgggaatacctcgcctatcttaaactcaaccacggagtctctcctatgttatggagttacgaaacctttactggtggatggttccggctcaacaatgagctaatgaactcactcttccgtcagtctttcgtcacccttgactggtcccgtctcgataaacgcgcctacttcacactgatccacaagatcatggcaggtgtacgaacatacttggactttgagaatggctacgttccgactcagcaatatccccgatcatctcatcaatgggatgcttatcaagctggtcgaattgagaacctatggttatggacgctggaaaatctgttcaaagcaccaatcgtgctaccgaatggaaacatgtatattcgcaaatatgcaggaatcccgtctggtttatttattactcaacttcttgatagctggtacaactacacaatgatcgcaacgatcctttccgcaatgggtttcgaccctcgctgttgcatcatcaaagtacaaggcgacgattcaatcgtacgcctagctgtcctgataccccctgccgctcacgttgaatttttaagtcgtatagaagaactcgcgctgcattactttaatgccgtagtgtctttgacgaaatcagaagtttgcaacaggttaaatggagttgaagttttatcatatcgcaaccacaatggcataccgcatcgcgacgaaatcaagatgctagcccagttctatcacaccaaggcacgcaacccgcagcctgagatagcaatggcacaagccgttggatttgcttacgcatcatgtggtcatcaccttcgcgtgtattactgcttgcgtaatttatatgaatactacgccgaccaaggctacaccgctaaccgcgctggcttagcccttgtctttggcaactctcctgatctggatctgccgcactatgatgtcgatcatttccctaccattcaagagatacaacgctacttcctctgcacagagtacaggaatcaagcccaagaaaacaaaacttggccccttgactatttcctcaatcccccttgctctcgtgacgatgattaa

SEQ ID NO: 1681 - DNA, 1755 bp, Rhizoctonia solani partitivirus virus 5
  source 1..1755: mol_type = other DNA
atgttttacactctcatctctgccgtcaaacgctttatttcaagcgctttcatcggctttgatcctcacggtttccagaataacttcgagtttatcggatacgcatctgatagaattcaagtttcaattccatcccgtgatgaattccaatatgaacgataccaacgaacagttcggcatgctcttcgccgcaacttacttggttacgatgctgaatacatcatctcggacttccatcatcccattgcaacaatggatttgatagtagctactctccaaaaaggagatcttcctgatcatcctattccgaaagacgctcactttcaacgcgctttcaatctagctgctgacatgttccgaccacctgtaccagtacgacccgttcattttgcagatcttcgtatgtacaaatggaactggcatccaaacgtagaagaacctttctactcagacatcgagcttatccgcgcagtcaacgctgctgctgaagctggtctcctccccgatgctagaatgtcatttggcaatctacgaaacgtcgttttcatccgtgcccgatcttttcttcatcagatcaagcgcaaccaaatcactaaccctggtgtgctctggcccgcaatgaaaatccacgtcaaacctgctcttacaaaagtagacgaactcaaagttcgtgttatttacggcgtctcaaaactacatgttttggcacaatgtatgttcttttggccactattcaatcactacatcaatagtgatgacgatcctctcctctggggtttcgaaactatccttggtggtatgcaaaagttacacgatatcatgagtattccacgtctacatttccagaccttcgtaactgtggattggtccggctttgatttaaggtcggtcttttcactacaacgcgaagtattcgatgtatggcgcacgtacttcgatttcaacaacggttacatcccgactaaattttatcgagaatcaaaagctgatcctcagcacctcgaaaatctttgggaatggcaacgcgaggcatgctttaaaatgcctttcattatgcctgaccgctctatgtacaatcgccgcttccgatgcatcccgtctggcctcttttccactcaattcctcgactctcacgtcaacatggtcatgatcttaacgatcctcgacgccttagaattcgatatctccaagtccacccgtatctatgtacagggtgatgacagtgttgtgatgctgatctttcatataccagccgaccaacacaaagatttcaaggcaaagttcgaagtgctagcaaagcactatttcgaccacgttgcaagaagtgagaaaacgaacatccacaacgagccaaatggtgtcgaagttcttggttactccaattacaacggctacccgactcgtgattggcgcaagttgctcgcgcaactgctccatccccgtggtgctctatccctcgagactcttgccgcacgctgctgtggtatcgcttacgcatcaatgtatcgatatccagaagtcatcaatgtgtgccgcgatatttacgagtacttgactgtccgccgtggcattaaacctggcgaacttcaagctcaacgcgacattatattgttcggtgaacatgaattttctatccctacagatcacttccccacacgtgacgaagtgacgagatacctccgcattccttataggcgcactcaagctgatcgtgacgactactggccctcaagccactttatgtcaacacactga

SEQ ID NO: 1682 - DNA, 1416 bp, Rhodiola cryptic virus 1
  source 1..1416: mol_type = other DNA
atggaagggttagtcatgattggacaagttccgactcgagcaactagagagcagtttcagatactcaaggatgaaccagtctacgaagtcgtgagtaaattcgcttccattgccgatatgcaagaaattgatggatgggcaagatcattctatactatagaaggacacatcgagtcgattatgcaatatcgaaaaccactacttccagaaccagacgaaccagcttggacagaagctaaagcttcagtgatgtacgacgttatgacgagtattcctcgtgtacgttccctcagcttcatcaatcaacttgatgacgttccatatgagagcagttcagcggccggttacggctatgctggtaagaagggtgaaggcgacaactttaaacgggcaaagtccataactaatgcgttagttcggacctacgttgagcgatgtgccaaaggcgagaaacaagaggctttaaaatctgttattacagaatgtactcctgatgtagcttttacaagaacacaattagcaagactaccctccattaaagttaggaatgtcttcggcgaggcctttcattatatattaattgaaggtttatcagcgtctcctctcttagaggcctttaaaagagcagacaccttttatgtgacaggaaaagatccgactacttatgtaccaagattcttatcacatctagacaatcaaccaggatgggttgtagctttagattggagtagatttgatgccacagttcaattatgggagattgatcacgctttccagtgcttggagaatgtgcttgactttccagaagagtattcacgtgcttgtttcttcttatctaaggaattattcaagaaacgaaagctagcagctccagatggagttatgtggatgagaacaagtgggataccctcaggtagttactttactaacctgatcggcagcattattaattacactagaattaaattcttatgtaataagcttgggtaccaaatgggagaagtaagagttcaaggagacgattcagttttcaaagctcaggcccccaacaagccggatgtctacgcaatagcgcaggcagtagctgatttcggatgggaattaaacccagccaaatgtgttgtgactcacaacaccgacggactaacgttcttaggtagaggacaataccagctatttaatatcagagagagactcaaagtcttacgacttttatgttttcctgaatatgaggttgatgaccccatgatttcaacagcgcgagttaaaatgatttgcaacgatgcaggttttagagatatgatgtataacaagatttatcttgctatgaatagactctatggtgaagcagagacagttccagaccgttacaaaacttatgttgatttgaatgattggcaagacgtcaatatgtaa

SEQ ID NO: 1683 - DNA, 1434 bp, Rhodiola cryptic virus 2
  source 1..1434: mol_type = other DNA
atggaactgaacgcaatattggatttcgagtttaaggactattcatcagacatgactagacaaccagaaactcatttccaccgtgtcaggaggattcctgaacacacaatcattgataagtatgctcacgcaaaacttatcaactttcaagaggaattgtttcgtcaagagcttaaaggatggtctaggagttattactcacaggcaaaacaccttgaggcattgatgaattattcaattcccaacatacctgtatctaaaataaatttcactttataccaatcgtgtgtaaatgaaattagaacagggtttcgtagccttccaaaagcgagggcatttgatgtacttacagagcttgatgcagtaacgtacaaatcgtccacagcggcgggctatgactataatggtgcgaaaggacctaagtatggccaaaaccataagagggcaataatacgagctagagctatagttggtgatgtttcagacagaggcattgaaggcatgaagaatgtcataaacactatggtaccagatgtcggatacactcgcacacagctaaccgatctcacggagaaaaccaaaatacgaaatgtatggggaagatctttccactacatcttaattgaaggactcacagctgatccactgatcagaatgttccagaggaacaacaccttctaccacattggccgtgacccattggacagcgtaccaaaagtactctcagaaatttcaaagcaaagcaaatggctatatgcaatagattggaaacaatttgacgcaacagtcagccgttttgagattaacgctgctttcgatattctattagaattaatagactttccaaacgcagaaacttacacagcattcgaaataagtagacaactatttattcataagaagattgccgccccagacgggcacgtgtattgggtacacaaaggaataccatccggtagttatttcacgtcaataatcggatcgatagtcaatcgacttcgaatcgaatatttatggcgaacactcactggcaaaggaccaaaagtttgttacacacaaggagatgattccatctcaggtgacgacgaactaatccttccagaagatttcgcacgaatagcgaaccaaattggctggatactcaatccagacaaaaccgaatactcaaccattccaagagacgtatcgtttctaggaagaaccatgacaggaggaatgaacacccgtagtacaataaaatgtctcaggttattagtttacccagaatatgaggtagagtccggtaggatatcagcttacagagcaagatccatagcagaagatgctggaggactaagcggcgaattaaaccgcattgcaaatgagttggagaccgaatatggagtagcgtcagaagacgaagttccagatcactttaagaagtatgtaatttag

SEQ ID NO: 1684 - DNA, 1440 bp, Rose cryptic virus 1
  source 1..1440: mol_type = other DNA
atggagcatcgcttccgtggtattcctagaggtctcattgagctcgaagaaatcccgacgcgacgcttacgcgaggagtgcgtaatacatatagacgcctggagctcacaagcaatagacgccatagtaccgctctcactacgcaacgaactagatggctgggccagaagctactacacgcttcaagcacacgttgattcgctcatgcaatatgatcgaccaaagttgcaaccacccaccaataccgcgtggaatatcaccacacagtatattcggactgaatttgctaggatgaagaaagtgactgcattgtcttatcttcaacttgaccaagttaaatgggtcagatcctcagctgccggctacggttacacaggtcgtaaaagcgacggtgataactacattcgagctcgcaaaactgcttttactttagcagagaagctcaatcataaccgagactacggtccactagctctagaagactctacacccgatgtagctttcaccagaacacagctatgtcagattaaggtgaagagaaaaattaggaatgtttggggagaggcgtttcattacgtcctactagaaggtctgttcgcagatccacttatccagcaattcatgcgcattaaatcattctactttattggagaagatccgctacttgctgtcccccgcctaatcgaggagattctatccgagcaagactacatctacatgtttgattggtctggctttgatgcctcagtacaagaatgggaactacgttttgccttcggcctactcgagagtatcttaatcttcccgtcgagtgtcgaacatcaagtttggcaattcattattgagctgttcatctaccgaaagattgccgccccaaatggcaagatatacctaaagactttaggcataccatccggtagttgttttaccaacatcattggaagcatcgtcaactacgtccgcattcagtatatgtttttccgactcacaagagagttcgtaaccgcgttcacacacggagacgacagcctcgtcggagtacccactactcaatacgttcagatggaaaacttcaaacccatctgcgatgagaacctttggacgattaacatcgccaagtcagcaatctcacgcgaagctgaaggtgtatccttcttaagcaggaaagtccgcgaaatgtgccatgcacgtgacgaacttatctgtcttcgaatgctcaaatttccagaatacatcgtcgagacaggcgcaatgtcaaccttgcgagccttctcaattcataaagacgctggaatcaattcccgctatttgtatcaaatctacaaattcctacttcataggtacggaaaggctgactcccttccgcttaaccagcagaactgggaccccatcgagtacgagaacctacgtgtttcttacgctactcagaattatgaataa

SEQ ID NO: 1685 - DNA, 1440 bp, Rose cryptic virus 1; identical to SEQ ID NO: 615
  source 1..1440: mol_type = other DNA

SEQ ID NO: 1686 - DNA, 1761 bp, Rose partitivirus
  source 1..1761: mol_type = other DNA
atgcgaaacactgttgtaattggacatcgtccagttttagccaagcctttatttggaaatccagatcctggatccaacccggcctacggcgacacagttgatcacgccctaaagcggcacctctctcccgaagagttcgacatcgtagttcacaaatatagacgctcaccttggaacgaagacgcattaaaagatgacattgctaaattagacagcaacgaacatcccgtcctcaaagatgaacattactatcgagctatcgaacatgttaagaaactctttacaccagaagagaaattgagacctgtacattttgcagatctccgctactacccatggcaactatcctccaacattggagcaccatttgccactagtaagaaatggcaagaatatgtcaacgacaaattcactgccggacaaaccgcccctcaagtgcgcaacctatttcaggaagcacacggcacacctctagaaccagaggtcatcgatcgacgaatgacaaaacgaaacctatacaatgaaatgtttctcattaaccgaaagaacatccatctcatcaaagatggacgtaagaccaatgactcaggtcatgatttgcgatattggcatacagcctttgcgcgtcaacacctagtcgaacatgacgaacctgataaggtacgcctggtcttcggagccccatcaaccctgcttatggcagaattgatgttcatatggcccattcaagtgagtttactcgctcgtggtcctgattccccaatgctatggggttatgaaacattaacaggtggatggtcccgacttcacacatgggcaaccaaagcccaacctagactagggtcagtattgaccttagactggagcagattcgataaggatgcacgccatacaattatcaaagatattcattctctcatcatgagaccaatgtttactttcgacaatggttatcatccaacggtatactaccccgaaactccagaaacagacccaaacaggttagagaatttatggaattggatgacggattcaatcctcaccactcccttaatcttacctgatggaaagatcttgcaatttatgcattctgggatttactctggatattttcagacacaaatcttagattctatgtataatagcgttatgttatttacaatcctatcaagaatgggatttaacatagaaaaggtcgcgataaaagtacaaggtgatgattcaatcatccttatgccttatcaatacactgttatcaaggacacattcctacaattcttctccgcgtatgcacaagaatattttggctcaacattaaatatgaaaaagagtgaaatcttaccttcattagaacgagctgaagttttacgttaccgcaaccacggtaccatgcccgaacgagatgaactacagcttctagcgatgctacgacacccagagaggacatcctctctaccatcacttatggctcgcgccataggcgtcgcctatgctaactgtgggaatcacacccgtgtttaccaaatttgcgaggatatctataagtacctggcaaaaggcggattcaaacccgacccctttggtttaccaggtggattacggtacaggcagaattacattccaagctacgttcagattgacattagtcacttcccaacgtattttgaaactgtcatgcacctccaagatcctcaccgtgcgattctaacgaaccgacactggccgacagatcactttatcggtacccccggaaagtcttaa

SEQ ID NO: 1687 - DNA, 1722 bp, Rosellinia necatrix partitivirus 10
  source 1..1722: mol_type = other DNA
atggcgacactcacacaccaactgtgcaacctcactaacctcgaacgaattggacgatttcggttcaagtttccccgaatgggcaaacatgttccaaaacataccactcgattcctcgagagatcgttgaagaaggcaatctggactaattgttccgcatcactggctgagcaggcaatcaatggatactatcgatcaccgacagacccactttcaggagagcaagatttcctaaagactgaccaaccctatcacccaatcccacgcgactatcactacagacgagccctacgagtatttgagaagctgtttcgacctagacgacgtctacaaccgatccacttcgcagatctaccccactatccttggaccctaaacacatcagctgaatttccctattccacttcaccctactggagagaatatgtaagacagaaatgtaacgaaggcgaaatcgacagtacaacagtcaactttcacaatttatataatgagatattcgaagataatagatggaaaatccacaaaattaaagaaggtcaagaacctttttggaaggatggagaacccgtaccttttggattcacttttctacattctcgatcgcacatgcgcaaaacaggcgaagatcctaagatccgagcagttttcggagtacccaagctactgctaatggcagaacagatgtttatctggaacctacaacgagagtatcaaaaccgccctctacatgaaggcccccttctttggggatatgaaactttcagaggtggctggaaaaagctagaacaacgactatgcaagactaagtttaactcaatcttgtcagccgactggtctggttttgatcacaaagcactccacgaactaatcgatgatgtccactcaatctggcgatcatggtttgacttcgacaatggctacgagccatctgttgatatagaacatgactacgctcgaactggaaccgatcctcaacgcctagaaaacctttggagatggatgtgccactcaattaagcacactcccattgttgcagaatctggaaacatttacagatggcgattcaacgctatcgcttccggctttcaacaaacccaactcctcgatacagcagtcaactgcataatgaaattcacttgcctatcggcctgtggaatcaatatcgaatcaaaggatttccaagcactctttcaaggagatgactcaatcagcgtcttcccagaacgagttgacttccaacgcttcctccccctcatgagagacgaagccgagcgcagattcaatgcaaccctatccgtcgacaagaccacttgtggcgaatggctggatggcattgaagttctaagctaccaataccgtggtggatttgcttaccgcgacccttcacaattgttagcacacctactctaccctgagcaccccagagacgagcctcgaacgatggcagcctgtataggcattgctaccgcatcgatgggcgtaagccgtgaactctacgacacatgtctagaccagttcaacttcctcgcttcttttggacacgaacccgacttttcacacaaagaattcttctggtggccgaaaactaaaacttttcccacttacgaagagacctggctacagaactttgatctccgagagagaacagagtctgacaggcaaggcctttggcctaccattcctcgtggaaggaaaggatttcgatttcttcagccctag

SEQ ID NO: 1688 - DNA, 2274 bp, Rosellinia necatrix partitivirus 11
  source 1..2274: mol_type = other DNA
atgttattaatcttcgacattgttctccttcacttcctcatacgtgtctacgcctacaaggttaaacacaagaagtctcaaaaggaaaacgtctggaaaatccgaaacgtctactatgagtacaagctcagagaaaagtacggatcaaacatccccccgtttgactactccaggtcaattctattcctcatcgatcagctcacatgctacaaactcgattggcaatatcaagactcactcgagtctatcgaagaacgtcgctacatgaaagaacagcccctcggcctctacgaccgaatagaccacgacgaaatccccgacattcgcctccccgccgaatcaatcatcgtcctgccctaccgctaccaccaaaagtcccccggacttgctttcactagtaacactaacaccccagttgcaatcgccgaccccgacgccgctgaagaaccccttgatcgcaaacccgcctcatatgatgtggacgccgacctctctggcctccctccccatcctggcatttacaagatcatctatgaatggttcccgctttacttaaagcatctcgacaccttctgtcgcccaccatcttatggaccccaggccttctacgacttcaaccgtccgctccaatcccacccgccccctccacccgaacgtgaaaatgaaatcttggatctcattgatggcatcctcgccattaagcccttccaacccatccacttcgccgacaccctcgcttccggaatccccttgaacacaagcgcttcataccatgacaaaaagtcacctgaatccatcattcgttcaaagctctcctccccaagcatctacgctgaaaagcaaacggcaaaaggacacttcattaacaccacacttggatacgctcgcacctacgttcacaacatcaagaactatggtacccccagctccgaaacgctagatgactcccttcaaccggacgaaccagcccaacagaaactcaagaactttcttctctctcagcccacagagttattcattcgaactcaaatctcgaaacgtgaccctaccgctaacaagaaaattcgcccagtctacgctgtcgctctaatgttcatcctcattgaaatcatgctcacctactgtctcctcgctcaactcaggaatcctgagtgcgccgtcatgcacggacttgaaaccttccgaggttctatgtctctcatcgatcgtgttgccctcaactttcaatcctttgtttcccttgattggtctcaattcgatcaacgtcttcccctttacgttatcatttcgtactatgctcgctttcttccccgcaagattgttatttcacatggatacgccgcaactcacacataccccgactcacgtcttaaaactcttgatgccttcgctatcaagatcttcaatctacttcagttccttctgatctggtatataaacatggttttcatctcctacgatggctatgcctatgtccgcacccttggaggtgtcccctccggtctgctaaacacgcaagctctcgactcttacggaaatctgtacataatactagactgcatgctcgaattcggtttcactaagtctgaaatcaccaacatgatatttttcatcatgggtgacgacaacatcttcttcgcacgagaaaacttctcgcgaatttgtgacttcatgaaattcctagagcaatacgcttctacgcgccatggaatggttctttcgatactaaaatccgtttggactacgctgagaacaaagatcgaagttttaggctaccgtaacaactacggcatgcccgaacgtgacattggaaagctagtcgcacaactagcattcccggaacgacctgtaccctccaacagaaactggatgcacgcagcccgtgccattggattagcttacgcttcctgtggacaagacgctacgtttcatcagctctgctacatggtctatcagaaattcaaacctgacgataacacgccagtgtctgcaaaacgctttaaagaagtcatcaaatacacagctctcgagctatttggctttaccgaagacacagactacatcgtgttccctgaatttccgtcactacattctgtccgattacaagttggttcatacgccggctttttctcagaaactgacaaatggaaagatactatctttaccaaccctccaagcaccacagatcccactgtcgttacgctcgctgattggctcactactcaccccgagtaccaatttacgaccacgaacatatggcaaggttatccttga

SEQ ID NO: 1689 - DNA, 1656 bp, Rosellinia necatrix partitivirus 12
  source 1..1656: mol_type = other DNA
atgcaagacatgaatttagttcgcttaggcagacaacctgtcaaccgtcgagaccgacgatttgccgaacgattcaacactcgtcagcagaaagtacttgaatctactatcaagaaagccattcacaaatgttgcaatgaagccttagcccgacaagccatacatggttaccgtcgaagcaagaccgaccctcgcagcggtgaagttgacttcctaaagacagatcaaccttaccacccggtaaagagagaccttcactatcgaagagccctcaaggttacagaatctatctttcgtcccacaaggcgactgaagccaattgctttccccgacttacgctcagaaggcgatatcgaagatggaagaatttcatttcacaatctttataacgagatatttcatgagaaccgcactcacgttcatcaaattaagaacggagagtctcccttttggaaggacggcaaacccgtaccttatgaatacaccaccttgcactctagatcacacttagtcaaagaagacaagccagacaagattcgcgccgtatttggagtaccaaaactacttctaatggtcgaaaacatgttcatctggaacctacaaaaagagtaccttaacgagaaaacctcgaagaaggcgatgctctggggtttcgaaacaatccgaggaggatggatgaagctacaaggctatctttctaagttcagagacaacacggtcctatcagcagattggagcggctttgaccacaaagcgctacatgaagtaatcgacgatgttcaccaaatttggcgatcatggttcgattttgaccaagggtatgaaccctcaaaatctgacactcacgactattctgtatcagagacagaagaatggagaatccagaacctttgggactggatgacacacgccattaaacacacgcctatcaaggccgaatcaggaaatatgtatcagtggaaattcaacggaatcgcttccggttttcaacagactcaacttcttgactcattcgtcaattgtgtttacctgctcacctcattatcagcagctggcattaacatactctccaaatcattcatcgcactatttcaaggtgacgattcagtaacttctttccccgaaaaagttcagaatgatatttttcttcacaaacttagctcagaagcaaaggaacgtttcaacgccgacctgtcccccgacaagactactattggtacgacagatgacattgaagttctatcttatggcaataaatctggatgcgctcaacgcccagcagccgaacttctagcccacctactctaccctgaacgtccaagaactgccgagactacagcagcagccgctgttggaatagctcaagcagcgatgggaacaagccgcgaagtatacgatacttgcgtcgagcttttcacatttttgacaactcagtggaaagtaactccggaatatcctgaaaggaatccggttttaacccacaatccgtggaatgatttcaactggaaaccaacaaaagtgcaaactttcccctcttttacggagacatttcttcagaattttgacaatcgcgtcagatctgagaatgataagcagcacctttggccaaccgttccaagtgatcaagccaatggatttcacttcctactggattag

SEQ ID NO: 1690 - DNA, 1410 bp, Rosellinia necatrix partitivirus 13
  source 1..1410: mol_type = other DNA
atgaagatcctccccaacctcacccttcttaaaaacaaccttattaggtatgcgaaaaagatcactcaatctcttgaaccagatcacttcctaccaacttacaataagattgtcgatgacgctctcctctctgaactttcagaagatgaatacaacaaagtcatcaatggattccgccgctctccctggtctgaatcagctcttgaagccgatatcaaaaagttagactctccatatcacgaagtgctcaaagatgaacactattacgctgctttggaatacgtttccctcacttacttcactcctgaagaaaagttgaaacctgtccactttactgatttacgtcagtacccctgggaactatctactagtattggtgctccctacgctacgtcgacccactggcaaaactacgtccaacaaaagtttaatatctctcgaggcaatgaccccgaacaagaatttagctttcctgagtatcgcgaccttttcgccgaagctcacaaaggacagtcccttgaaccaacaatggttaacgctcgcatgacaaagagaaacctctacaacgaagttttctttatcaacagaaagcacatacatatgataaaagatggccgaactcacaacgacaaacatcacgatttgcgatactggaacacagctttcgcacgccaacatttagttgaagccgatgaacccgacaaagtacgattagtatttggcgctccttggttactccttatggctgaaatgatgttcatatggcctgttcaaacatggctattgtccaatggtgaaacatcccccttactctggggtttcgaaaccttaactggtagctggtaccgattacgtcgcttttttcaaaaagtaactcccaatttcggtctctgctttacactcgattggtccggttttgatcgctacgcgcgacatactgtactggatgatattcatacgaagatacttcgaccaatgtttacgtttgaagatggataccaccccaccttctcttatccaaagacaacagctgaacctcagcgacttgaaaacctttggaactggatgactaacgccgtcaaatcgacccctctgcttatgccagacggacgactatttagatttgaacactcaggcattttttccggttatctacagacccagctcttagattctatatataacttggtaatgatatacacgatcctattccgactaggctttactgcccaacagattaaacttaaagtacaaggcgatgattcaatcatcctcatactttgttgtttcctcctagtttgtaattggttactacctatgttcacacattacgctaccgtctacttcggagctaaagttagtgaaaaaaaagcgaaattcgagacacacttgaagacgctgaagtcctaa

SEQ ID NO: 1691 - DNA, 2232 bp, Rosellinia necatrix partitivirus 14
  source 1..2232: mol_type = other DNA
atggttttctcatccgtccgtaactatcttactgaacgcatcgaacgcgtaaagaaagaatggcaaatctaccagtcctctggctcagatcccgcctcgacccttgaaactcattccaccttgcacgattccgatacccgccgctactacaactacgctgccaaacaaccttaccttgaacatcaatcccagatgctccaatcagaatttgacaacctcgtccgcgccttcgaaattgacaacaagaacaagcaccaacccttcgaacttcacaagccaacctcccccgactggccctaccctgaaaatagaatccccgctcctggaatcaagtccgtcccactcttctaccacacaggccacatcatccatgctgaccccacaacgtcccgaccgcttcatcccgatcaagaaactgactcccaagaatcctatatcccaggtgatatcgacttcggccccgaaatcgaccctctcctcaatgaactcctcatccgcaagtaccctgaatacatcccgtatgccaagaaatactgccgccctgctggaacaacagacgcaaccttccgcgacttcaataaagaacagaaaccctctgctcccatcgatccctctcgcaaagaacacgtcctcaagttcatattccacttcctcgactgcaccccttatctcccgattcacttcgttgatactcaatatgctaagactcccctcacaactggaaccggatatcacaatcgcttctcctacaaacagaaagcacacgctaaatactcacatcccaaagaatatgccgaccgccccacctcaaaaggtttcttctacaacgcaacctatgaaaacgctcgcaccataattcacaaaatcaagatgtctggcgtccctttcaacctgcacttcgctcccgaagctacagatctatcagatgcacaagtccaagaatacatcgacaaacacaacgatttctttaatgactacccgacactccttttcacccgtaatcacatctccgaccgagaaaagactctcaaagtccgacccgtttatgctgttgacgacctcttcatcatcatcgaacttatgctgaccttccctctcctcgtacaagcacgcaaaccctcctgctgcattatgtatggactcgaaacactccgtggctcaaaccacctcctcgactccctagcccaatcctacaacaccttcttttcactagactggtctggatttgatcaacaccttccccgtgtcatcacagacatttactataccgacttcctccgtcgcctaattgtaatttcacatggctaccaacctacgtatgaataccccgactaccctgaccttaatgaacgcaaactctatgaacgtatggataacctcctccacttcctccatctatggtataacaatatgacctacctcaatgttgatggtttcgccttccgccgcacttccgctggtgtcccctcaggcttgtacaacacacagtacttagactcattcggcaacctctttctcatgattgatggtatgatcgaatttggcttcacagacgaagagattttctctttcctcctgttcgtcctcggtgacgacaacactggcatgactctcctgccattcccgaaactccacgaattcgtagaatttctcgaatcctactgtctctcccgatacaacatgaccctgtcccgtacaaaatcagtccttactaccgttcgcaataaaattgaaactttaggctaccgcgccaactttggcaatccacgccgcgacacagacaaactcgtcgctcaattactctaccccgaacacggtatcaactataaaactatgtcctcacgcgccataggcatgcacatcgcctccgccggccaagacagaacgttctccaacttctgtaaagacgtattttacatgttcttaccattccacgctccctcagagcccactaatctcgctttcaagcgccgattcttcggtgatctcgaagaaactatccctttctttgactccgcagaacctgtcttcccatccctcgaagacgtccgctcactatatgcaaattacgctggccctctcaagtatgcaccaaaatggaactacgctcacttcatcaatgaccctgacgccgttccctccttcgcgaaaacgatgcacgacttcgaactcgaacacaatcttgttccacgtcaagctcccaccttcgcaacggtctcacgtttaccgtga

SEQ ID NO: 1692 - DNA, 2244 bp, Rosellinia necatrix partitivirus 15
  source 1..2244: mol_type = other DNA
atggcctactcatctatccgcaactacttcgctgaagccactgctcgaatccgcaatgaatggaaaaatttccaatcatccttcgaagatcccgaactcacttctgaacgaatccttgacaacgatacccgacgacattatcaacgcatccgcgtaactgaagaacaagacgctcaaatccttgaagccgaataccaacacctcaaagctacctttgaacaccaaaacgatctaaaattcgaacccttcgaattattcaaaagaccgactgattggcaccctcttcctgaaaatcgaatcccagcccctggattagttaacgtacccgttttctaccacactgaccacatcgtactcgctgaccccgaaacatctcgcgcactatctcctgaccttatctcagactacgccgaatcttacatccccggagacatcgactttggacaaccaaccgacccgttgattgaaacccttctttcacgaaaataccctgaatacctgcacatcctagacaaatactgtcgacccgctggaacaacagacgctactttccgagacttcaataaagaacagaaaccttccgaaccatgcactgaagaacgagaagaacgaatccttaaactcatcgatcacttccttgacattcaaccttcccaaccacttcactatgtagatacacaatattgcaaacttccccgtgttactggaactggctatcacaaccgccattctttcaaacgacgcgcacatgcaaaattttcccacccccaagaatacgcttcccgacccacatcaaaaggttactaccataacgcaacctatgaagccgcccgaatactgatccacaagatcaaaatgactggaatcccctttgacgttgacttcgacattatccccaacatgcccgaaaaacatttcaaaatccttatttccaaatacaaccaattctttaattcttacccaaccatgctatttacccgtaatcacatctctgaacgagaaaagaccctcaaggtccgccccgtttatgcagttgatgaaattttcatcattatcgaacttatgctgacgttccccctcatcgtacaagctcgaaaaccgacatgcgcaattatgcacagtatggaaacacttcgtggctcaaaccacttaatcgaccaacttgcaaaaagcttccgctctttctttaccattgactggtctggatacgaccaacgcttgccccgtcccattactgactgcttcttcctcaagttcctacgccgtaagattatcatctcacacggatatgcctctactatggaataccctgattaccccgaactaacccccgatgctatgtatcaacgaatggacaatttactacatttccttcacttatggtacaataatatgaccttcctttctgctgatggctacgcttaccgccgcctctatgctggagtcccttctggactctacaatacccaatttcttgactctttcggtaatttatatttactaatcgacgcaatgatagaatttggatttacagatgaagaaatcatggccgtcatcctcttcgtactcggagacgataactctggacttacctcctggcccatcgctcgacttctcgaattcatttcgttcctcgaatcctactgcctaaaacgctggaatatggtactctctgctaccaaatcctgcaaaacgacagatcgtggaaacattgaatcccttggttacagatgtaactatggaaacccccgacgagatatcgaaaaacttgttgcccaactctgctaccctgagcacggcattaagtaccgcacaatgtccgcacgcgccattggtttagcctacgcttcttgtatgcaaagccgaactttctacgcactatgtaaagacatccatgctacgttcctcccttacctcgatccctctgaacgagaaatccttagtcttagacgacaacttagtcccgttgacacctcaactgaactagaactagacatcgatttcacgaaattcccttctcctgaagacatccttgatatgatctctcattatcacggcccccttccgatccactcaaaatggaattttgctcacttcatgaatcctcccgactatgcccctgaaaacagcttcactatgtatgaatatgaacagaaaaatggactaactccacgcactgctcccaatttacttcatcttaatatgcttgattcagaacaggtagacgaccttcttggcgtctaa

SEQ ID NO: 1693 - DNA, 2193 bp, Rosellinia necatrix partitivirus 16
  source 1..2193: mol_type = other DNA
atgcctgtcttctccaagctagctgacttaccgtccgcacaagctgtttacagcaatgttcgctcctactttaatgaacgaatgagtcaatcaaagctccaatggaaaatcttccaacaggaacagaaagacccagacgaaattttagcaagaacacaagactcagaaaacctccgaatctacaattccttccgctcccgcttcactgaacgccaacaaaaagacattctcgaccaagaatttcaaaaccttcgcgcaaactatgaaacatcaaatcaacgcagaaatgaacctttcgaattttatgaaccccgtgatctcaacgaactccctgaaaaccgcctaccccaacctggaatacgtgccgtccccttgaaataccacaaaggacaaacaaccgtcgcaactgacgaagtccctgaatctggattcaaaattgaccctcttctccaagaacttctcatccgcaaatacccagaatacttatggatacccaaacgctactgccgccccctcggaacaaccgatgctacattctccgattttaatcgtgaacaaaaaccatctcttcctatccctactgaacgcaaagaacgtatactatcccatattctcaaacgcctccatgcagaaccttaccttcctctacacttcgtagatacccaatgggccaaacttcccctccccaccggaaccggatacaacaaccgacacaattacaagacaaatgcacatgccaacttctcacaccctaaagaatatgcagacaaacgaacttcaaaaggatactacattaatgctttcctcgaaaagtctcgcactctagttcactttatcaaagatcaaggataccccttcctatggacctggaaatcagaaaccccttctgacgatgaaatgctcgccttcatgcgccgcctcaatcgcttcttcaacgaatatcccacgctccttttcactcgcaaccacatctctgaccgcgatggaaatcttaaacaacgacccgtttacgccgtcgacgaactatttatactgctcgaaattatgctgacctttcctctcctcgtacaagcacgcgcccccgaatgctgtatcatgtatggactcgaaacaatccgtggctcttcccactatattgattccgtcgcaaaatcttatgactctttctttaccatagactggtctcagtttgatcaacgcctcccccgcgtcataactgacatctattacaccgacttcttagaacgtctgatcgtaattaatcatggataccaacctacctatgactaccccacatacccagatctaaccccagaaatgatgttcgaacgaatggataatacccttaacttccttcacacttggtataataatatgaccttcctctccttagatggattcgcgtaccgccgcacacatgctggtgtaccctcaggcctatttaatactcagtatctcgactcttttggcaacctcttcctcatccttgatggatttatggaatacggattctccgatgaccaaatcgacgctatcctcctatttgtaatgggagatgataactccggtatgaccccattgaccataacatccctttccaatttccttacatggtttgaaacttatgctctcgcccgctacaatatggtactctcgaaaaccaaatctgtaatcacaattatgcgaagcaaaatagaaaccctgtcctacgctgcaaacaacggaaatcccatccgccctgttgaaaagctcgtcgctcaactcctctacccagaacgaggcctcgatgctcgatacatgtccgcacgctcaattggactcgcttatgcgtctgctggttctgaccgaaccttctatgccttatgccgtgatgtatatcacactttcttaccctatgccgatctctcatcagacattgatctcatgcgcacaaaatccatgctccctggctacctcaaagccttagaccctgaagatatacccttctcttttatggaattccccactctcgacaagatccgacaacagtactccaagtacctcggccctcttgactatgccccaaagtggaactatgctcattttatcaatagtcccaatgtaatccctccctcatctcaaacgatgcacgaatatcgaatggaacacaacattccacgacaagatgttccttgcctccctgaagatgtatag

SEQ ID NO: 1694 - DNA, 2178 bp, Rosellinia necatrix partitivirus 17
  source 1..2178: mol_type = other DNA
atgcgtctttccgttcctcccttcgtgcaactcgagcaacctcactctgagtctcaccgtcgcaacgttgaatatgctaaacttctcgaaaagttccgacaaaaccctacattgaccaaccgcaatgctctacagtccttcgctgatgaacaaggtttcaattacttcttacctgtcgacgaaactacctttcccgaagatagacaacctgcccctggtattcaagcactttacggtttccgatttcatcctcttgccgatacactccgcaaatggaccgatatccctaaaactggttacaatcccctcaagtttatttatgaactagtgactactatgttttgtacctatctcgcaatcctcgtcaattactgtcgccctgctggtgatgcagatgctatctttgaaaatttcaatcaagaaacagctcctgtcgaacccatcaaccccgaacgcctcacggttattatgcgtctgattcatttctttttccgcattaagccaacctcccccgttgccttccctgacctccgattctatcgctggacacttacaacagcctccgactatcacgctcgtcattccgacgattacaaacgtgactcagcaaattactgggatcatctgcgcaagcatgataatctcgaagaacgctttgactattcagaacgtcccttatccaaaggttacttcttcaatacatttttgctaacctgtcgaactatcgtccacaacataaaatactatggctttcccttcaaaaccgatcttgatatcgatgaccctgatgtcctccaaaaatctcgtttctggttcatgaaatacccaactatgatgttcgtccgctctcaaatttctaaaattgataaactcaaagtccgccctgtctacaacgtccccatgttgttcctcttccttgaagctatgattactctagcgctgatggctcaatgccgtaagcctgaaaattgtttgctctggggatacgaaacaattcgtggtggtatgcaagaactcaatcgcgtcgcgcttgactttaccgtctacatgatgcttgactggtctcgttttgaccaacttgccccctacgaagtcgtttatcacttctggtgtacttatcttccgcaaattattcgcgttgatcgtggatggatgcctaccgaattctattcctcagccgaacataaggttaattttgaccttaaagataagaactatgctgacacccccaaatatgctcgcttccgatccaaactctctggactctatgccccacaagtcattatgttttctttcattatgtacaaccttctctcatttctatggttttggtatgtgaacatggtatacgtaactcctgatggattcggtttcgttcgccttctcgccggcgtctgctctggtctattcatgactcagatatcagacagcttcattaatgcatttttaatcattgatgctatgctcagctttggctttactgaagacgaaatacgcttaatccgaatgttcattcaaggtgatgataatatcctctactttcttggtgacttcgaacgcgtcttcgcattttacgaatggctacctcaatattcactcgatagatggcacatgatcatctcagttgacaagtcctcaattacccgacttcgccaacgtatcgaagttcttggctacaagaacatgaatggtatgcctcaccgagacacttccaaactcgttgctactctcgcctatcccgaacgttatgtgactggacctaaatggccaatcatcatgatgtcacgtgcaatcggcatcgcttatgcgaatgctggtcactctcgcgaagtacacgacctctgccaacgtgcatacaagcacgcccgcaagctttccggactcactcacgatgagttgaaatccgttgagattgattatggtagacttggaatgttcgaaatcttctccgtcatgatcgacgaatacgaatcgatcgttgtgactaatctttcagtctttccagacttttacgatatccgcaacaacctccgattctggcacggaccacacaccgtttaccccatgtggccccgtcatttcctcgacgatctatcgactatccaggatgaagatgaactaattaccttgcatgacgttatgcaatcaggtggttttacgatccgaaaacatttctaa

SEQ ID NO: 1695 - DNA, 2223 bp, Rosellinia necatrix partitivirus 18
  source 1..2223: mol_type = other DNA
atgccgttcaacacccttcgcaactaccttgccgaaaagatcattcgcgtccgcaatgaatggaaaatcttccaatcaaccgaccaagatcccgaacagactctcgaacagaaccaagattctgacactactcgcatgtacaagctcaagtattacaacacaaaagatgaagccaaaacaagaatgctaaatcaagaatactcgactctcgttgaagcaatgcgtaccgactaccaaactcggcaccagcccttcgaactccacaagcccgtcgatcctgacgcccccttccgtgaagaccgtacccctgctcctggaatcaagactgtcccacttttctaccatgctggtcatgtaatccacgccaacccagaaacttcccgtccgctcaatcccgacaacgaaaccgatgctgctgaatcctacatcccaggtgatatcgacttcggacctgaaattgacccacatatacgctgtctcctcgaacagaaatatccgtcataccttccttacgtccacaaatactgccgccctgccggtacaactgatgctacgttccgcgacttcaataaagaacaaaaaccttctgctccaattgatcctgcccgcaaagaacaagtcctcaaacatgtatttcgcctcctcgatgccactccttaccttcctcttcactttgttgacacacagtatgctaagctcccgctctctactggtactggatatcacaaccgattctccttccgacaaaaagctcacgcaaaatattcccacccccccgaatacgctgaaaaacccacttctaaaggctacttctataatgccacctatgacatggcccgcacgctcattcataaaattaaagaaactggcgttcctttcaacttccactttgctcctgaagatcaagacgtctctgatgaacaagtccgcgattatatcgctaaatgtgacaacttcttcaatgactacccaacgctccttttcacccgtaatcatatctccgatcgcgaaaagactctcaaagttagacccgtctatgctgttgatgaacttttcattattatcgaagttatgctaaccttccccctcctcgtacaggctagaaagccctcatgcgccatcatgtatggtcttgaaaccattcgtggttccaatcactattttgattctctcgctcgcgcttattctaccttctttacgattgactggtccggctatgaccaacgtcttccacgcgtcattactgacatctactacactgatttcctccgccgcctcatcattatcaatcaaggttaccaccctacgtatgaataccctgaataccctgaccttactgaacataacatgtacactaaaatggataacctcctccacttcctccatctttggtacaacaacatgacattcctttctgttgatggttatgcttaccgccgccttttcgctggtgtgccctccggtctatataacactcagtatctcgactcattcgccaacctattcctcctcgttgacgctatgctcgaattcggttttaccgacgaagaaattgagaagatacttctctttgtcctcggcgatgataattctggattctgtccctatgatattggccgcatgcaccgcttcctccaattcctggaaaagtacgccctcgctcgttataatatggtactctccgcaactaaatccgtcctcacgactctacgctctgagattgaaaccttaggttaccaatgcaactatggacaacccaaacgtccacttgacaaactagtcgctcaactatgttacccagaacacggtatcaagtttagcacaatgtcgtctcgcgcaattggaatctgtgtcgccgccgctggccaagacaaaaagtttcattccttttgcaacgatatttacactatgttttctcctttctggaaacctagccccggactcactctcgacatgaaacgtcgcttcttcgctgatgaagaagtagacctgccattcctttctgacgatactctaatgcccttcccctccttccaagaagttcgtaagatgtacgccacctaccaaggaccactctccttcgctcctaaatggaatttcgctcatttcatcatgcctcctgactattgtcccaccacccgcaaaactatgcacgattatgaacaagaacactctctttacgttcgaattgcgcctactttcgcaactagtgaacattactag

SEQ ID NO: 1696 - DNA, 1821 bp, Rosellinia necatrix partitivirus 19
  source 1..1821: mol_type = other DNA
atgaaattctccaacattaaaattcttggctacaagcctgaattcgctgtgcccatccacggccgcgatccgaacgtctcgaacccgctgactgatatctacaacaaaatagtagataatgctctcaaccgctttctcactcctgacgaatctgatcaagtcatcaatggatatcgccgctccgcatggaacgaagatgccctaaaagaagacatcaatcgattagactctgacgaacaccccgtcgataaagacgaacactatgaaaaagctctcaatcatgtgtacaacttgattaaacctgagaagcctcttcagcccgtccatttctctgatctccgccactataaatggcgcatctccactaactgtggtgctcctttcaacgctatgaagcgctggaaagattatgttgttacaaagttcaagtattttcaacgctcccagcctttcgaaaacattgcacatcgtgatttattcactgaagcgcacgaatcttccgaacccctcgaaatatccgacactcgaatgactaagcataacttatacaatgaactgtttttcatcgcccgcaaagtaatccaccgaattaaactcggtttcacttctaactctcaaggtgaatcttacctgtactggaacaccgctttcgcccgtcaacatctcgtctcaaaagatgagcctgataaggtgagacttgtttttggtgcccctttcaccctgttagctgctgaactaatgttcatctggcctctccaagcccatctcctattcatgggagaaaagtctccgcttctctggggatacgaaacaatcttaggtggttggtatcgcttacgcaactacttctctcgtgtcattccctactacggaactgttttcacatgtgactggtctggatttgatcgccgtgctcgacatactgtaatccgtgatatacaatcacgaattatgcgccctatgttcgatttttcacaaggctatcaccctacccacaagtatcgtgattcatcaaaccctgatccccgccgcaaagaagacgaccttccgatctctgagaaacttgagaacctatggaactggatgtgtgacgctatcttacgaacgccactccttatgcctgatggtacgctcctcgaattccaacattctggaatttacagtggttacatgcaaactcaaattcttgactccctctacaacatggttatgttattcacaatcttgtctagaatgggttttgatatttctcggctcaagctgaaagtacaaggtgacgactcaatctgtctcctactccaactattcatccaactagctgcaggattccttaccctattcaaacactacgctacatactattttggcgctgtgatgaatgaaaagaagtcagaattgcttcccactctcgatcatgccgaagtccttaaatacaagaataagtgtggtattccatacagagatgaactctctcttcttgcccaacttcgccatcccgaaagatctactactcccgaagctctagcttcccgctgcattggtatcgcctacgctgcgtgtggacaacttcctcgtgtctacatgatctgcgaagatatatacaactacttaactcaagtacgtggtacgattccaaaacagtcagaactagatttctacttccgttatatcgaaatgtcctccggacaaatatttcgaccaactgctgctcgatttccgtcttatcatgagacgatgtcgcacttaatggatgctcatagtcccgtcgctccctcgcactggcctcttgaccatttcattggccgccctggtcaacactga

SEQ ID NO: 1697 - DNA, 2268 bp, Rosellinia necatrix partitivirus 20
  source 1..2268: mol_type = other DNA
atgatttcaattttcgcaattgttctcatgcacttcaagctcaaactctgggctaactctctgcgccacggaccgaatccaaaatctgacgtatggaaaatccgaaacgtttattacgaatacaaacttcgtgaaatacactcaacacggatccccatctttgattactctcgttccctccttttcctcatagaccaaattctcgtcacccgactgaataacagctacgacgatcagctcaacgcaatccaagagaaacgcatgttacgcgaacagccactcaacctatatgattctatcgaactggaagacatccccgaactccgacgctcaaaacccggcattctcaaccttccctacaagtacatcgaaaaatcacccggcctcgcttattccgaaacctccaaatcacacgttgcctttgtagaaccctacgaagcagaagaacccctcgaccgaaaggccgaaacttatgacgtcgacgctgacctctccggcttaccagcccatcccggcatcgcacaaatcatacatgaatggttccctatgtacacgcaataccttgacacatactgtcgacccccctcttatggaccccaagcattttatgacttcaaccgaactatcgaacctcatccgttccctaccgccgaaagaaacgaacacatcctgtccttactcgacccgatcctcgctattaaacctttcgccccaattcacttcgctgacgctctcgcttctggaatcccgcttaacacaagtggctcctaccatgacaagaactcgcctgatatcaagatacgctcacgcatctcatccccgtccctatacgctcgaaaacctaaatctaaaggttattcaatcaactcgaccctcggatatgcccgtacattcattcacaacatcaagaactatggcaccccctccggtgaaacgctctctgactcacttcaacctgactctgtagaacaatccaagctcaagaactttcttctctctcaacccactgaactatttattcgaacccaaatctcaaaacgagatcctaacgaatccaagaaaatccgacccgtttacgccgtcgcactactcttcattctcatcgaaattatgctcacctactgcctcttaacacaactcagaaaccctgaatgtgccgtcatgcacggactcgaaaccttccgcggttccatgtccctcatcgatcaagtcgctctctacttcacatcctatgtctcactcgactggtctcaatttgaccaacgactcccattatatgtagtcatctcctactatgcctactttcttccccgcaagataatcatcaacaaaggataccaagcaacacacttctaccccgataccacattcgctgaccccagcgcattcgctatcaaaatctttaatttactacagttccttctaatctggtatgtaaacatggttttcatttcttatgatggctacgccttcgttcgcctgctcggtggagtcccctccggactcttaaacacccaagctctcgactcattcggaaacctttacatcatcctggactgtctaatcgaattcggcttctccgatctcgaaattaagaacatgatctttttcatcatgggagacgacaacgtcttctttgcccgtgaaaatttcaatcgcatttgcgaattcatgatctttctcgaatcttacgccaaaactcgacacggtatgatcctctcaattttaaaatctgtctggacatcacttcgctcaaagattgaagtactcggttacaccaataactacggccttccaacccgccccatcggcaagctagtcgctcaactcgctttcccggaacgcccagtccctcacgacaagaactggatgcacgctgcccgtgccatcggactcgcctacgcctcatgcgcgcaagacgcttccttccaccttctttgttacatggtctaccaaaaatacaagccctcagctgacgtacacgttaccgctcgacaattcactcgcgttatcaagtacacagtcgctgaactactcggattcacatctgatgatggcctcatcgtctttcctgaattcccaagcttgttcactgtccaccaacagatctcccattaccatggacacttctccgaaagtgacaaatggaaagagacgatcttcaaagactcacccagtgatacatcttccgatgtcgtcacgcttgcagactggctcaaactcaaccctgagtacagtttccgaacagacaacatttggcaaagttaa

SEQ ID NO: 1698 - DNA, 2166 bp, Rosellinia necatrix partitivirus 21
  source 1..2166: mol_type = other DNA
atggttttctcatctgttcgcaactacttacaagaacgtcaagcacgtatcaagtatgaatggaaaatcttccaacaagctgaacaaacgaatcaagacccatccgatctcgcctgcctcgactccgacctcgaacgattacactacttcgctcgcgaccgccttctcgaaactcagaaatcccagatcctcgaacatgaattcaacggcctcatgcactctatgcaacttcaaaacaacatgaagaaacgcccttaccaattctcgtcatctgaacatttccacggactcccatccaatcgtgaacccgcccccggtatcgtaaacattccccgcgccttccaccccggtcaaatcgtctctgctactgaagaactccctgaaactggattcgaacttcaccctcttatcaagtatctcctcgaacacaagtacatgcactaccaacgtactgtcgacaaatacgtccgtcccctcggaacaaccgactctactttcgctgactttaatagagaacagatcccttctgcccccattccaaaagaaagaaaagaacgcatcatgaagcacgtccacaaacgactcaacacttcaccttacttgcctcttcatttcgttgacacacaatacgctaaattacctcttcacacaggaactggctatcacaaccgtcactcttttaaaactagagctcatgcaaaatactctcaccccgaagaatacgcacatcgcgcaacctcaaaaggctactaccttaatgccttcctagaattagctcgcaccctcattcacaggataaaagaatccggactcccattcgaattcatcttcaacgaagaacaatcctccgaagagcaattcaacgcgctcgcttcccaactctccctgtttattgacaatcatgctactatgcttttcactcgcaaccacatctccgaacgtgacaagaatctgaaacaacgtcctgtttacgcagtcgatgaattattcatcttaatcgaaattatgctcacattcccacttctcgttatggctcgcaaacctgaatgctgcatcatgtatggcctcgaaactattcgtggcgctatgaacaagattgactccatagccaaagaaaaaggctatacttccttcttcaccatcgattggtccgctttcgatcaacgcctccctcgcgtaatcaccgatctttactatactgaattccttgaatcactaatcgtaatatcccacggctaccaaccaactagagaatatcccacctaccccgatcttactgaagaaaagatgttcaccagaatgtctaatctacttcaattccttcacacatggtacaacaacatgaccttcgtcaccgctgacggttatgcttaccgccgcacttgcgctggtgtaccctctggtctgtacaatactcagtacctcgattcatttggaaatcttttccttattatcgacgcactcattgagtttggctgcaccgacgaagaaatagaagaaattcttctctttatcatgggcgatgacaactctggattcacctattggtctattgaacggctcgacgccttcatatcattccttgaaaagtacgctcttcaacgctacaacatggtcctctccaaaactaaatctgtcattactgtactccggtcccaaattgaaatgctatcctataaatgcaattctggccgacctactcgctcccttgaaaaattgatcgcccaactatgctatcccgaacgtggcccaaaggacaaatacatgtcttatcgtgccatcggaatcgcctatgccgctgctggtatggacaacgactttcacgagttctgcctcgatgtctactcgatgttcaaaccttttgctgcccctttaaccgaagagaatctaccctttgtcaaagcctacctccctggctatctcaaagcccctgatctccctgaagttttagcactaggaacattcatcaagttcccgactatcgacgaagttatcgatgtctactctcgctatgctggtcccctcgactacgcaccaaagtggaatttcgcacacttcatcaacgctccaaacgtcgtccctccctccaccaagacgatccgtgactaccgaatcgaacatgaaatcccatgccctccggtccccacgcttcccatcattggttaa

SEQ ID NO: 1699 - DNA, 1842 bp, Rosellinia necatrix partitivirus 22
  source 1..1842: mol_type = other DNA
atgacagagaatctaacctacgtcaaatacattcctgagagcatgagaagcgctccgaatgtctggaagattgcacgacctgcgatggaagcccgaaacgaatggctcgaacgacagatgcgcaaattctataccgacgaggaagtagaccaggtgatgacaaaccgacgatccgcagatagtgatgaagcattaatggaagattttttccgatgtgaattccctaaacatgaaattccacaagacaagaatttcaatgacgcgattgaattggttactgaacatttccgacccgagagagttttacacccagtatcatttccagatttgagaaactaccccttcgaacttgccgtttcagcagaacgaccttttactgatccgactttcaagttcaaacctaccgacagagacgtcgacatggagacaggagttccaaaagtttcaaagcgaggagcaaagaagctaaagaaatggacaaaacacacggatgtgaatacctatctgagatggaaacaatcagttggactaactgacaattcaggagttacatatcacaacctctacaatgagattttcatatacaacagaccactcatccacatgatcaaggaaggagaagaacccttttggaaagatggcaaaccaataccgtatcaagagttgacactgcacatgcgttcacacgtagtagcagcaaccgaaccggataaaatccgagccgtatttggcgcccccaaacttctacttcacgctgagcttacgtttatctggccgctgcaagcgagctacttaaatggtaaatcaggacgaatgttatggggaagagagatgaatcgcggaggatggcgcaagctatttcaagagatgcatagacatggaccaccaaaaacaattcttggagttgattggagtcagttcgacaaacgacttctacaccagcttataagagtagttcacaaaatttggaggcaatactttgatttcacgaaatacgaacgcaccaataaatatcctaacgcaaatccaagagacccacgccgaattgagcgactatgggaatggatgtgcaatgcgatcaccgacacacctatccttctacccaacggacaagtttggagatggaattggaacggatttggatctggatttcaacagacgcaactaatggatacttttgccaatgcaatcatgatctacacctgcttattagcgatgggagtgaatgtacgagcgaaagaattctgggcacgatttcaaggagatgattcaatcattgcctttttcgaaagaatgttccaattatttggaccaggctttctaatcatgcttgaagaatgcgctaaacactacttcaacgcgaagctgaatgttaaggaatcagcaatacaatcaaaagcagacggaatgtttgtgcttggatatttcaacaacaatggactagcctaccgcacagatgaggaccttttgcgacacttgatgtttccagaaagaccacaggactttgggagactagcggcatcagccgttggactcgcctcagccagtttaggatgcagcaagccattttaccacctttgcaagcttatttttaataagattgtgcacaaaaagggatataaagtaagatggacagcactgaaatggatgatcagagcacacatttatgagaacattgaccagctcaagaagatggagttccctaactattacgacttatgtgagcgacgattcgccatgacagacaggacagaatcagagatgcagaatcaatggccgacacgaccacggaccgaagaatctgacttctttttcttagacgatataacaataccagtttga

SEQ ID NO: 1700 - DNA, 1716 bp, Rosellinia necatrix partitivirus 23
  source 1..1716: mol_type = other DNA
atgtactggttcacccgtttctacaactggttaaccgactaccacccacgtctttctgtcaatttcaagttcatcgcttggaacgaaccgaaacccgtcccccccctcaatgacctagcttttgcgtcctaccgcaaagtcgtcgatttcgcattcaagaaacatctctacggatacgaccgcgactacatcatctcaagctttcatcgggctccgcccacaccggacctgatatacacagctctcgccaaaggcgatctccctgaccacgtcattcctcaagatgaacacttccaacgcgcacgcgctgaagcaaagaaacgcttcgccccgcctaagaaagttcgtcctgtacacctcttcgacctccgacattacccttggaagcacaaacccagtgctgaagaaccgtacaccagcaacaaagaactcagacgccgattagaagaagccgctcgcttcaagattatcgctgacgctcgcatgtctgttggaaacctcctcaactacatcttcgacgatgtatcaaaattcgttcacaatatcaaagctggtatcatcaaacctggtgaatcaactcctcttgttaacgtccatgtcaaaactgctctcacacctatcgacgaagcaaaactccgactcatcttcggctgctcgaaacgatggattttccctatgtgcatgtttttatggcccttgttccgctattacctttatgaacaacaatctcctcttctctggggatatgaaaccatccttggtggctggcaccgcatgaactcagaacttctatgctcttacctctactaccaaactttcgtcacaatcgattggtccggattcgacctccgcgcccttttctctctgatgcgtatgatctacgctgactgggaagactatatcgacttcgacaatggctacatgcccacgaaaagataccccacctcctcgactgagcctcaccggctcaaacgtctctggcaatggtgcgttgaagctcacttcgcttcagccttccgcatgcctgatggctccacttggatccgcctcaaccgcggcatcttatctggtctgttcgaaacacagttcatggattcacactacaacctgatcatgatcatgacaatcctcgaccgactcggattcgacatctccaatatctggatcaaagttcaaggcgatgactcaatcaccgcacttcgctttcacatcccagccaatcaacaccgagacttcaaaatccaattcgcatattgggcaaagtactactttgaccacaagtgcaacgatgagaaatccgaaacttcaaacaaccttcaaaatgttgaagtccttggctatcgcaacaacaacggttaccccgaacgcgattggcgcaagattctcgccgtactttggaacccccgctcccgctctccgaagcctgaaaacacaatggctcgctgtatcggactagtttacgctagcatctacgaccgcaacgttgtcaacgtctgccgcgatgtctacgaatactacgaatcaaaaggctttctccctaactcaagccccgacactactctcgaattccaattcatgttcgatgaagtagatatcccacgtgaccacttccccacacaactggaagtcactcgttacctacgttccctcaataatgtaagtgatgaaagaaaacgacgatactggaacccagactggttcctcgccgaatattga

SEQ ID NO: 1701 - DNA, 1797 bp, Rosellinia necatrix partitivirus 24
  source 1..1797: mol_type = other DNA
atgctgaacattcaaatcctcggctccttcaagtctgctgcaaaagcgatagttggtcacttgaccactccgctccgcgttgaaacgtacaacaacatcgttgatcacgctctccgacgctttctcactcccgctgaaaccgacgaagtcatcaatggctatcgccgatccgtctggtctgaagactcactcatgaatgacatcaacaaactcaactctgaggaacatcccgttcctaaagacgagcactactggaatgcaatttcgcacgtccaaaagatgtttactcctgaaactccgcttcaacccgtacacttcaccgacctcagaaagtatccttggcaactctcaacttctgttggcgctccttacgctacaagcaaatcttggcaaaactacgtccgcgaaaagttcaatggctacaagaacggcgatccgccttctaaatttactaagccctactaccgcgatctatttgctgaagcccacaaaggtcaatctctcgatcctccgatgctcgacgctcgaatgacgaaacgaaacctctacaacgaattgttctacattacaagaaaacagatccatcagatcaaagatggcattaccgaattcaaaggtcgatcattcaagtattggcacactgcctttgctcgacgacacttggtatcaaaagacgaagacgacaaagttcgcctcgtatttggtgctccattcaccggtttatgctctgaactgatgtttatctggccgattcaagcctggcttctcagccttggcgaaaagtctccgatgctctggggatacgaaacgcttcacggcggttggtatcgtctcagaaacttcctcactcggatggcccctcggcacgaactggttgcaacactcgactggtccggattcgatcgacgcgctagacacacagtcattcgcgacatccacactaagatcctccgacctatgttcgatttcaccaagggttatcaccctaccttcgactatcctgattcctcgacagacacttacgatgcacaacgcaccgaaacactctggaattggatgaccgacgcaatcacttcaaccccgctgatgctccccgatggcacactcattaagtttgttcattccggcatttactctggatacttccagactcagcttcttgattctatctacaacctagtcatgatattcactatcctttctcggcttggcttcgatctcgacaaagtcgtcattaaagttcaaggcgatgattctatcttcatgttactttgttgtttcattcttatcgctaactggttcctcaccatgtttaaacactacgctctctactacttcggcgccgtgctcagtgacaagaaatctgaaattcgcgactctctcgaacatgcagaagtcctcaaatatcgaaatcgcaacggtatcccataccgcgatccgatcgctctgctcgcccaacttcgacatcccgaacgttcagatacactacaggcactaatggctagagccattggtatcgcttacgcgaactgtggttctgacccccgtgtttaccaaatttgtgaagacatttatctttacttggcaaacaaaggtttcacacctgatgcaaaaggccttccttctggcctccgattcatccaaactcaccttcctggtggcgatgaaacgattgacatctccaggtttccaacctactacgagacagttctcccgctcatgaacattgaacgcgaaacgctctctgacaagtactggcccacttcacactttatcggtattcccggtagagcctag

SEQ ID NO: 1702 - DNA, 2202 bp, Rosellinia necatrix partitivirus 25
  source 1..2202: mol_type = other DNA
atgttccttccatcaatccgtgacatctactctgaggctcaatcccgcatcagaaaattcaaccaatggttccacaactccaacgatgacgtccctgaacactccacatctgttctccttgactctcaacacaaccatgaattccctgaccctgaatctctccgtcactacttcgaacgcatcgaaaaagacacttctcaccgtatatttaatgatgaagaagctagacacaacgccaaacaaacatatgataaatatgtagaacgcgacgtccaaaaaggtgaacccttcgaattctatacctcaatacaccatgatgacattcctcctgaacgctatcctgctcccggtattacaattctccccctcaagtttcactctggccgcaccgtcgaaccaaccgacgaagttcctgttactggtcactctatgcatccaattctcgaataccttgttactcacaaatggtatcattataaaacatacactgacacttactgccgtcctctcgatacaactcaagctacttttgatgacttcaacaaagaacaaaaacccgtagacccaatcccgcaatcccgaattgatttcgtcctccctctggtcattcatttcctaaatgcactcccctacttaccgcttcattttgtcgatacccgtcgtatgaaaatgcccactcacactggcactggctatttcaaccgtttctcctacgttatgaaaacacatgccgcatactcccatccacatatctatgaacaacgcccaacctctaaaggttatttctataatgctatgtatcactactctcgaacatggttacactatatcaagaaatttgcgtcccccggtccactcgtttacaattcgacacaatatctcaaatcactaagaacattctttacacaacatgcaactttacttttcactcgtatccacatctcaatgcgtgatggtgctttaaaagtacgccctgtatatgctgttgacgatttcttcatcctcattgaaggaatgttaacctttccgctccatgctatggcccgtatttcaattaatggcacaaaatcatgtattatgtactcctttgaaactattcgtggtggctgtctttaccttaaccagctcgctatgcaatatacctctttcctttgcatcgattggtcatcctatgatcaacgacttcctcgtgtaataactgatatcttttggactcaattcctccgctccttaattgttatcaatcacggttaccaacctacctgggaatatccttcccacaaagacttagacgaacatgcgctataccaaagaatggacaaccttctccatttcctccacacatggtataacaacatggtcttcgttacctctgatggcttcggctatcttcgcgactactgtggtgtaccttccggtctcctcaatacacagtacctcgactcctttggtaatctattccttatcatcgacgctctttacgttttcttttcagaacgtggcctcgccgatcctgacatccgaaaacagatcctacagatcgttttcttcgttatgggtgacgacaacgtccttttcacaaaattggatctcgacactctttacgctttccttgtcttcctggaatcttatgctctttctcgctacaatatggtcctttctaaaacaaagtccgtccttactgtactccgatctcgaatcgaaattctatcctaccgcgttaataatggcaaacctatccgccctatctataagctagttgctcaactatgctttccagaacatggccctaatgataagtttatgtccgctcgcgctatcggaatcgcttatgccgccgccggccaagatcccgactttcatgaattttgctccgacgtatactctatgtttaaaccatttagtgtacaattaacaccagaaaacatcgaacgtgcaaaataccacctccctggttacttcaaaatgtttgacaacattgctgaagaaattccgtttgatcacttccccactatcgatgaagttctcgccaaatactcaacctggcaaggctatctcaaactcgataagaaatgggatcctaactggtttgttaaccccccgtacgccgtccctcctagttctaaaacaatggctgactaccaaactgaacacagtttaccaactagagacactccttaccttttcaaccaacatgcttaa

SEQ ID NO: 1703 - DNA, 1755 bp, Rosellinia necatrix partitivirus 26
  source 1..1755: mol_type = other DNA
atgcccgctccaaacttgcgctacattcgaacccttctcacaagagaacgacccaaagcctatcctctcaaaacgacttggctcatggatcgcaccagaagaagagctgttctcaaagccttctacaagtaccttcccgaatcgattgttgacgaagtcaagaatcaacgacgaagcgaatactctgatgaatctcttactgaagatttcttcaagaacgaacaaccggaaatcaacctcaaccgagatttccactaccgcaaagcgcttagagttatgactaaactcttcaagcctaaaaggaactacaagcctgtggccttcccagacttacgttactacccttggaaccttagaacctcagctgaagcaccttacacgcattcagacttttggaactcttacttacgaaacaagatgttcagaaaggagattctagacgcggcaccttcattccacaacctttttgatgaattgttcatcaagaaccggaaccttattcatatgatcaaagacaagcattctgccttcttcgactctcacggaattcccaaaccatactactgggtgacacttcacgcacgtagccacgtggtcggacctgacgagcctgataagattagagctgtatttggtgtacctaaactactactatttgtagagaacatgttcatttggccgatgcaagctgacctgcttaatcgtgacccagaacactctccaatgatgtggggatgcgaaatctcccgtggtggctggaaacgccttagacgcctgatccacaagaaaacaggatcaaagttcagaactgtgctctcagcagactggtctcaattcgaccgtcgcgcacttttctcgatcatcgacgacacgcatgacatatggcactcattctacgactgggacggatcttacgctcctactacgtactaccctgatgctcatacagaccctcaaagactacaaaacttatgggactggttcacgcacaacgtcaaatactatccaatcgccctgcccaatggtgacctttaccaatggacgcgaaatggtatagcctccggatatcaagagacccagctcatggactcttgggttaatggaataatgctactgacctcgctatcggaactcggagtcgacatagaacataaccacttctttgtcaaactccaaggtgatgactccatcgcctgcttttccgaaggattctttaggatctatggtaagcaacgatttttatcgaagctagccgagatcgctctcaaaagattcaacgcgaagttgtctgtagacaagtctgatgtcagtgaccgactggacggaacatacgtccttggttactacaacacatccggtctcgcttggcgaaccgatgttgacttgttatctcatctactattcccagaacgctcacaggatctagctgctaccgctgccaccgcagtcggaatcgcgcttgcatccatgggatgttcacgggtggtttacgacatatgcaaagatctttttgactttctaacgattgatctaggcgtagttgcaaaaccagaccccactatgatgaggcagattctccatacacatggaggaatctacggctttcccatctctgaagccggaacgatcatggattttccatcctttgacacatgctattttcaaaactacgtgttagacggaagatctgagaccgaaagagaacgaacttggcccaccgatcccgaacgatcaggaggatttgctttcctatag

SEQ ID NO: 1704 - DNA, 2130 bp, Rosellinia necatrix partitivirus 3
  source 1..2130: mol_type = other DNA
atggttttctctcaagtacgtgactacctgcacgaactccgcaatactctcaaccgagactggcgcttataccgaatcttcggcgaaaccacacccgaccccgactccgaacagcctgacatcgatctccgccgtttagacaaatcctaccgacaacgcgatcttgaagctcaactcacctccgagtacaagcaacactacacagacgcccgctatgcatttgaagaatccgaccacctcaaaggcgaaccttttgaattctcgattccctcttctgaaccactccccgagaaccgactccccgctcccggcattcatgctcttccaatacgtttccacaaggaacaagtcgtcactgcaactgaacaagttccagaaaccggatatggcctgcaccccctccttgaatatttgctttcgtacaaatacccacgctacatggaacatactattaaatacgctcgtcccctcggcaccaccgacgctacattctctgacttcaatcgtgaacagactgaatttccgccaatccctgctaacactatgactcgcattcttccccttgtatgcatcctccttaacgccaaacccttccttccacttcactggatcgacacattctttacacacatgcccctcgtcactggtgtctcctatttctatcgacactcctacgaactacgcacacatgctgccttctcacatcccaaagaatacgctgacaagcaaacctccaaaggttactttttcaacgccttctccgaatgggcccgcactgtcgttcatcgcataaaagaattcggctatcccttctctaccgaaaacctttctccaaccgaaatatatgataaaatgcgcacattcgttattcaacatgcaacgtccatctacacacgcaatcagatctcagaacgtcttggcaacctcaagcaacgtcccatctatgctatggatactctttttctgcaccttgaatgcatgatctcctttccccttcatgttatggcacgttccattgactccgcaattatgtactcctttgaaaccattcgtggtggctgcgccttcatggatattcaagccaaaaagtacaaatcctatctctgcatcgactggtcatcttttgatcaacgcatgccttggattatcgtcgacacattctttactgtctttctgccctaccttctcatcgtcaacaatgcatatcatccaacatatgaataccctgactaccctggtcttacagctgacaagatgtattctcgactctttaacatcatttgtttccttcgtctctggtattacaactgcgtcttttacgtcgctgatggctacgcttacgtacgccgcttcgctggcatcgcttctggcatgctcaacactcaatacctcgactcctactgtaatcttgtcctcatgatacacggtctcctccatttcggatgcactgatgaagaaattcttcagatctgcttctttgttatgggtgatgataatgtgcttctcacgcactggccgctatctcgtctcaacactttccttaactggtttgaagctcacgctctctcccgctttggcatggtcctctccagacaaaagtcaatcattacacaaattcgtacccgcatcgaaatgctcggctaccaatgcaatggtggaaatccaaaacgctcaattccgaagctagttgctcaactatgctatcctgaacgtggccctgatcccaggtacatgtcctctcgagctataggtatcgcttacgccgccgctggcagtgatcctaccttccacaatttctgcaaagacgtctacttgactttcctcccctatcaagaagacctcaccaccgaacacgctgcacatagagcacgacgccacatccctggctacttctcgtacctcttctctcacgaaccctcgtttgacattgatctgctcaccttccctaccatccatgatgtccgttcccgatatcaacgctggcaaggcgaactcgaccaagactcaaaatggaacccctcccattttaagtttcaaccagattacgctccgtccaactccattactatgtctgaatacatgactgaacattcattattcttccctgatgtccccacactctttacatag

SEQ ID NO: 1705 - DNA, 2235 bp, Rosellinia necatrix partitivirus 4
  source 1..2235: mol_type = other DNA
atggctttcaactccgtccgcaactacctcgccgaacgcctcgcccgtgtcaaagaagaatggaaacttttccaatctcatcacagcgaccaaaccgaaaccgcacaagctcacgaagattccgatctccgacgatactataaggcaatttcttccgatccaaccaacgaagtaaagaaccgtatgctacagtcagaattcgacaacctcaaagctgcaatgcgcatcgacaatgaatcacgctctcagccgtttgaactgcactcgcaacctcaccctgacgcaccttaccctgattcccgacttcccgcccctggcatagttagagtccctctcttctaccactctggccacgtcatccacgctgaccccctgacctctcgaccgctcaatcccgacctcgacgccgaccaacttgaatcctatattcctggagacattgactttggacctgaaatcgacccgattctctacgccctcatcactcagaaataccccacctacctgccgtacatcaacaaatactgccgtcccgctggaaccacagacgcaactttccgtgattttaacaaagaacagaaaccatccgcgcccattcccgaagaccgacaagaagctgtactctcacatgtatttcgcctcctcgacgctaccccttacctaccgatccactttgtagacacccaatatgcaaagaccccgctcgttaccggtactggataccataatcgtttttcctataaagctcgcgcccacgcaaagtactctcatcccgcagaatacgccgaccgacccacatcaaaaggctttttctacaacgctacttacgaaaacgctcgcacgatcattcacaagatcaaggaatccggagtcccctttaacctgcacttcgcccccgaagacgccgacctgtccgacgcccaagtccaacagtacatcgactcatgcaatgacttcttcaacgattacccgacactccttttcacccgtaatcacatctcagacagagagaaaactctcaaagtccgccccgtgtacgctgttgacgatttattcatcatcatcgaactcatgctgaccttccctctgctcgtacaagcccgcaagccttcctgctgcatcatgtatggatacgaaacgatccgtggagcaaaccacctgctcgaccgactcgctcgctcctatgaaacctacttcaccatagactggtccggttttgaccaacgcctaccacgcgtcatcaccgacatctactacactaagtttctccgacgcttaatcgtaatctcccatggataccagcccacctacgaatatcctgattaccccgacctcgacgcccacaaattgtacactagaatggacaacctccttcattttctccacctctggtataacaatatgactttcctttccgttgatggctacgcattccgccgcacttccgccggagtaccatctggcctctacaacacccaatatctcgactcgttctctaacctcttccttctcatcgatggaatgatagaattcggcttcacagatgaggaaattcgctccgtcctgctcctcgtccttggcgacgataacactggcatgaccagtttcgacctcaagcgcctcaaggaattcatctccttcctcgagtcttacgctctcgctcgctacaacatgcacctttccaaaacaaagtctgttatcacatcccttcgctcaaagattgaaacacttggctactcatgcaactatggccgaccaaaacgcccccttgacaaactcgtggctcaactgtgctaccccgagcacaaaataaagtaccacaccatgtctgcccgcgctattggtatcgcttatgctgccgccgcacaagatatcacatttcacacattctgtcgtgacgtgtataccatgttctcagtgttttacaaacccgacgttcgttctaacctcgacttccttcgctccgtcctttccgacctcgaagtccccctcgctcatttcgattcgtctaccctccccccgttcccctcgttcgaacaagttcgtgcgcgatacgcctcttaccaaggcccactccaatatacacctaagtggaacatcgcacatttcaagaacatgcccgacgtgatcccggaaactggtgaacctgttatgacaatgcacatctatgaaaaacttcatggcattactcctcgcatggctcccacgttttcaacggttgtacctagtacataa

SEQ ID NO: 1706 - DNA, 1944 bp, Rosellinia necatrix partitivirus 5
  source 1..1944: mol_type = other DNA
atgttctttaagcacacaatgcatcgattcaacaaacgaacaacaacactaagacctacgaaacacgaaacgcctcacagcaacatcagatacatcggaacaccgaagcaacgatatcagaagcctgattacagacaagaactcaaggaagaagcggaacgagagagagccgaatggctagagcgtcagatgagaaagatatatttcgacgaagaagtaaatcaagtactcacaaaccgacgttcagaatactcagacgaacgcctgatcgcagactttaaagaaagcgaccagccattgcaccctataccaagggactcgcattacgacagagcagtcaagatgaccgcagagcattttcgcccagcgcgagaactcaaccctgtccacttcccggatctaaggtattacccttggccattgagcatatctgccgagacaccctggacctcagaaggattcagatttgtcccagcatttagagacctggactcagagactaccaaacccaaatttggcggagctaaacaaagagcggagaaatggaaacgttttgcgcattttgtctaccgtaattttggatctggttcgataaacgtactacagtacctgaagctgaaacagagatttggactgatcgacaacagcaggacaacttttcacaatttgtatgacgaaatgtttcaatacaatcgcggaagagtgcacaacatcaaagatggtgaaggtgctttttggaaagacgggaaaccacaaccctacttctggaatatgttacatgctagatcacacgtagtagcacaagacgagccggacaagattcgcgcagtatttggagcaacgaaactacttttgatgatagaactaatgttcatctggccgctgcaagcgagctatttgaatggaggatctggccgaatgttatggggatacgaaatgacgagaggaggatggaagaagctttacaatgaaatgcataagcgacagccgttcaacacgatactaggaatagactggtcaaaatttgacaaacgtctacttcacgagttgatcgaccaagtacatcaaatatggaggagctactttagctttgaccgatatgaacctacgtctaagtacccaaacgcaaagaccgacccagctagactggagcggctatggagatggatgtgtcatgcaatcagacgaacgccaatcatgttaccaaacggagaactttgggaatggttttggaatggattcggatctggataccagcagacgcaactcatggacacattttgcaattgcataatggtctacacatgcttgtcagcactcggaattaatatcgagagcgaccgcttttggagcaagtttcaaggagatgattccttgattggaatgcttgagcggatgtaccttatctacggaaatcattttctggatatgttagcagatagcgcaatgcactacttcaacgccaagttgaatgtgaaaaagagtgacatccaagatagagtgaccggaatgacggtactcagctattctaataaattcggaatatgttcacgaacagaggaggacttattacgacatctttatttcccagaacgagaacgagactacgcaaagcttgctgcatcagcagttggcttagccatcgcagcaggaggagagcacgaacgctttcaccggctatgtgagaaaatattcgttcatatcactaagaagtggaatctacgtccaaaatggaaagcaattcaatggatgattagagcccatcacttcggcagtgaagaggaattataccgagcaaaattcccggaccgactgaagcttatgtctgaagtttacgcatacaaagaacgtagcgaatcagagaagcaacgacagtggccgacttacgcaaaagaagaaggagatttttattttcttgagcctgtgcaaccagcatcagtttga

SEQ ID NO: 1707 - DNA, 1827 bp, Rosellinia necatrix partitivirus 7
  source 1..1827: mol_type = other DNA
atgcctaatcttacattcatcaggaagctcaacaattatgagatgcccaaacgatacgacgatgacagacagcaatcaatggacttcagaaaccaatggctagagagacagatgcgaaaattcttcacaaaagaagaaatcgatcaagtactaactaaccggagatccgactattcagacgaagctctgataaacgacttcaaacgttgcgaacacccgtaccacgagatacctctggactataatgttcaaacagcaattgacgccgtcacggaacaattccgaccaaatcgagttctacacccgattcagtacccagatctacgctactatccctggacactcaacgtttcagcagaagcaccatggacaagctacaactttcacttcgttccaatggacagatcagttgatttcgagtcaacccagccgaagcttatctttgacatcaatcaagtcaacaaactccgaaaattttcgaagccgacagacgtcaaaacctatcttcgatggaaacaacaagttggccttatcgagaacgaccatattacgttccacaacctgtatgacgagatattcatctacaatcgaccactcatccaccaaatcaaggaaggagaagaaccattctggaaagacggacaaccagtcccttacctctggaatactctacacgttcggtcacatgtggtagcacacaatgaaccagacaagttgagaggagtcttcggagcaaccaagctcgttctgcaaacagaacaacccttcatctggcccttacaagccagctacttgaatacagacgcaggacgtctactttggggaagagaaatgagtaaaggaggatggcgaaagctattttctgagatctacaccttcggaccaccatcgacggtgctttcaacagattggagtcaattcgacaaacgactactccaccagttgattagaatagttcacagaatctggcgttcctatttcgacttcactcgttacgaaccaaccaaccagtacccgaacgcaaacccacgcgatcctaaacgcctcgagcgcttatgggattggatgtgcaatgcaatcacggatacaccaattctactgcctaacggcgagatttggagatggcaatggaatggattcggttctggataccagcaaacccaacttatggatacattcgcgaacgcgatcatgatctacacctgccttacagcactcggtgtcgacgtgacaaatccaaagttttgggcacgctttcaaggagacgactcacttgtcgccttttttgaacagatgttcagaatatatggaaacgatttccttatcatgttttcagcagtagcggagaagtacttcaacgcgaaactaaacgtaaagaagtcatccatacttggccaagcacacatggccaccgtactcagctaccctaattggcatggaacagcattccgtactgatgaggacctactacgacacttaatgttcccagaacgaccacaagatctcggacgcctcgcagcgtcagcgatcggactggctcaagccgcactcggctgctcagagaggtttcacaacctatgtgagtatatcttcacgaaattagtgaaaggtaaaggagtcaaagtcaagtggcaagcacttaagtggatggtacgcgcaggacaattcgagacaatcgagcaactcaaacgcacagagttcccgactatcgaagagttactatcacaagcgcaaatcccagcaatcagaacagaaagcgaacgtcaacgcatttggagaaccactccattgagcaaagactcgtttcatttcactcatgatatttaa

SEQ ID NO: 1708 - DNA, 2262 bp, Rosellinia necatrix partitivirus 8
  source 1..2262: mol_type = other DNA
atgctcacacttttcactatcgtcactctcaacatcctgctccgttttcaacaacgccgccgacgaaatgaaactacttccacgctgattcacccaatccgcaacattctatttgaatgggaatttcgccgctcaatcccccttgacgcctccccctaccctgtgttcgactactccaagtcccttctcgcatacatcgacctcatcacgtgtcacaagatatctatccacttaaaagaagacatctacaccctcgaagaacgatactcctcccgcgatgaaaacttccacctctacgagtacatcacagacgccgacctccccccagatcgtcagcccgccaatggcatctcccacgccgaacgccgctaccactcgatcccctccggctcactcaacgtcaacgacaaaattgaagtcatctcaaacgaccccgacttcatcgaaaccaacgaatttaggtccaacatccttttcgctgaatcactcgacctcaccggctcacccccccatccacaaatcgaaaagctcatccaagattggttcccccaatacgtcccctatctccacgagtactgccgtcctccctcctttggaccccaagccttcctcgacttcaacagagatactcccgaccctcagcccccgactcccgaacgccacgaagccatcatgcgcatcgtccgcctcaaaatgaacatcaagccttaccggccacttcacttcgcagacgccctcgccgctgaaacccccctcaacacctccgcttcatattactcaaagttcaaccctgaaactagagttctcgctcgctattcgaccccttcccgttactctgatatgcccacctccaagggttattttattaacgttatgctcaacgaattccgtctcgaattccatcacatcaaatatgatggtatgcctttccctactgacagacatgatcacgaaacaaatctcacgatccttgacacctggctcgccaaacatcctgcccagctctttattcgcacgcaaatctcaaagcgcgatccttctgaccccaagaagattcgtcccgtatactcggttgatgacagatttctccacatcgagaaaacagtctccaccccgctcctcgcccaaatgcgcaacccgcaatgctgcgtcgcacacggactcgaaactttccgcggttcaatgtccctcattgacaaaatcgctcacttcttcctctcctttatttcattggactggtctcaatttgatcaacgattaccttattatgtaatcatcgctttcttcctcgactttctcgcatccctaatcatcgtatcccatggttacatgcccactcgttcctaccccgatactaaatcggacatccactccttcgcccgaagacaatataatgtactagttttcctaacaacctggtacctatctatgactttcctgtcattcgatggttttgccttcattcgcattcacggtggtgtaccttccggactactcaacacgcaatcgctagactccttcggcaacatgtacatcataactgattgtctactggaattcggatttacagaacaagaatgtcttgaaatgctattctgtgtccttggtgatgacaacctcatcttcctacagcacaacctcgaacgaatcacccgatttatggtattcctagaacgatacagcaaagaccgccacggtatggttttatccatcctaaagtctatgttttcgaatctacggaccaagattacgttccttagctatgagaacttctttggccatccttcccgacccatcggcaaacttgtcgcccagctcgccttccccgaacgtcccgtccccccggcacgcgaatggattcacgctgcacgcgcactcggtttagcctacgcatcctgtggacaagaccccaccttccaccttctatgcaaaatggtttacgaaagattccgcccttccgtccccgtaccaactcttcatatcaacaagatattcaagaaatggaaataccaacttccagattttgacattgaagaacttgaatacaccttccccgactttccaacttgtacagaaatcttcgccctagtctctgactatcatggcgtcttctctgagacagacaaatggaatttcaacgtgttcacggtaccacccagtgataaccttcctgattacgtaacgctcaagaactacatccagcaatcgcctgatgtgtcccacaccgttaacgaattttggcatggtaagagacccttttag

SEQ ID NO: 1709 - DNA, 1845 bp, Rosellinia necatrix partitivirus 9
  source 1..1845: mol_type = other DNA
atggaaacaatcacctctatgttcaatagaatcaatagattcttcacaggcagcaacaatcttgagttcgtcggcacctaccaccaccatccacaaactccagtgcctaatctgaacaacattcgcgcacaccaagtcactttggagaaagctttcgacaaatacctcaccgatgctgagatcaagcatatcacacaagctcttcgacgtagtcaaactacacaagatgctatcctcgctgatttcttttccggagatgttgaaccgcacgacataccgtgggaccaacacactgagattggccttcaagccatgctcgacgccttccgtccaccacaaaagtgccttcccgcacacctaaacgatgttgagcatcactacccatacaaatggcaagttaatgctgaaccacccttcgtttcggatgattatttcctcgacaacagaaagaccttcggcgacttctggaaccctgttactaaacagtggaccggatacgtcaatcccttggatatgacgagacgccatggaaccgaaccttcggacatgttgctttcgcaagtcactccaccaaagtttggctttatgaaaggcatgatattttcctggacacgaagatggcaccacatcatcaagaaaggattctccgacactacaggtctcgaaaacacgtcctactttcaacgacgtttcatctttcctatgttgttacacaccaaaaccgcaatcgtcaagaaagacgatcccgacaagatgagaaccatctggggctgttcaaaaccctggatcatcgcagatactatgctatactgggaatacatcgcttggctcaaacttaaccctggctcttcgccaatgttatggggctacgaaacattcaccggaggctggcttcgactaaatgcacgatcatcattcatcacgatcgactggaagcgtttcgataagaaagcttacttttcactaatccatcggatcatgcaaggcacccgccaatatcttgacttctcccgcggctatatacccaacttcgtttatcacgagcacaaagactggaaccaatcaaaggaactaggcttacaccgactctgggaatggacactggaaaacctgttcaacgcaccaatcgttttgcccgacggcaagatgtacaagcgaaactacgcaggcataccttcaggtctcttcatcacacagattctagactcttggtacaactacacgatgttggctacccttctctcggctttaggatacaacccacgtgaatctatcatcaaggttcagggcgatgactcaatcatcaggctcggtttactccttccacctaatactcacgacgaatttttgactaagatgcagaatcttgctgaccactatttcaaggcagttatctcactagataagtccaacgtccgtgacactctcaacggttgcgaagtactttcgtacacgaacaaccatggctggccccgccgcaacgagatcgagatgttagctcagttctatcatacaaaagcaaataacccgactcctgaaataacgatggcacaagccataggattcgcttacgctgcttgcggaaaccacgaccgcgttcacactgtatgtaaagacatttacgagtactatcatcgtcaaggattcacgcccaacccggctggatttacactagtttttggagactcaccagacaggcctgaaacaccattcaagcttgatcacttcccctcagtcgccgaaacacaaagatacctaacctacacggaatatcgcaataaagagcaagatctacgcacatggcctacaagctactttgcctatctgccctgcgcacgtccttag

SEQ ID NO: 1710 - DNA, 1737 bp, Sacamano partiti-like virus
  source 1..1737: mol_type = other DNA
atgaacaatatcgaatttatcaagcaagcaacaaacacagaagtagctcaaggcatcattgaatttagaggaaatcaaattaaccatctgaatcaaaagacagtcaagaaagcactttataaacattgctcacctgaattagcgaacaaggttattcatggatatagaagatcatcttctcaaccgcaggcaattgaagccgatttcatgaaatcaaacgttgagtacatcgacatacctcgagatatacattatcaaagagcgattaaagtcgttactaagatgtttaaacctagcaggactttaaaacctgtatcgtttcctgatttaaggtactatccttggcatttatccgtatctgctgaagtcccatttacaattaatgataagtatatcaaaattgtagctgagaaacaaagagatggagaatgtgatggaaagcttacattccataatctttacgatgagatcttttacctcaatagagcattgattcatcaaattaaagataaagatcctcaattttggaaggatggagtgcctaagccatattactatcatactttacatggtagagctcatttagttgagtcacatgaagatgataaaattcgagccgtatttggagtcaccaaactattcttattcgcagaagccatgtttatttggcctttgatgaaggaactcttaaatggaaagacagactcaccaatgttgtggggatatgaaaccattaaaggaggatggagagcattacactctttattaacttcaaggaatttgaatacatttatatccgcagactggagtggatttgatagaactgtaagacacgaaatcattacagatattcataacatcattcgcagttacttcacttttgaagaagggtatgaacctaccttagcagaagctcaaggcgacgcaagactcggatatcctcaatcatcaacaaacgcagaaagattagagaatctttttgaatggatgtcatacaatacgaaacacacaccaattaagtctccactagaaaatatctataaatggaagcattctggattagcatctggattccttcaaactcagatcttaggatcgatgattaacgcaactatgctgttaacatctttgagtgcattaggtattaatattgaagctaagaactttactttaaaggttcaaggcgacgatagtatcattggatttgctgaaagagaagcaactatcaataaagaacaatttcttgagaagttagcatccgaaaccaaacgtagatttggagcaacaatgaacacgaagaagtctgagattcaaaacaccgtcgaaggactaagtgtattatcttaccgaaacaaaggaggatacgcatatcgtgaggaagacaaattattggcactgttactacacccggagaaatctgcaacacccgaagacttagctgcatcagctatcggaattgcttactcatcaatgggatctagtaaaacagtttacaacgtctgcaaagacgtacacgactttttgactaacaagatgaacgtgaaaccaaattttagatcatgggaatggacgattcaaatgaatcatgaagaattaccttttacagaggaatttccaacatttcaacaactcgtagaacttaatacagtctaccaaccaagatcagaaaccgctaaacaaagaatgtggcctacaaggccaaaaggcgaatttggatttcatttcgttgacgattag

SEQ ID NO: 1711 - DNA, 1461 bp, Saccharomyces cerevisiae partitivirus 1
  source 1..1461: mol_type = other DNA
atggaaacgggatatcaaacccttttcagatatgtgttcggatcttataaaaatgttgatcttaaacaaggttttggaacaaaaagaattgaaccatcaccattcatcaaagtcccaggttacgaggattggtggagagatgttactgatcggtcttctatggaagcacgatttgacgccttttcaacacctataactatgcatattgatgaagatttgtttagtgaagctgtcaatgatgtatactatatgtttttcaaacattatggtgcaccattgcgagtctcatcgatcgatgagtccatttccaaacttccaaatgatacggctgccggcctaccatttaaaccaggagtgaagaaaggacaagtctggtccgagctcagacagctggtcgttagaagttggcgagaggttaaaagctctcatcgattatcggttttaccatgtaaagctggtgctcgaaggcaacttcgcgaacgaggcaagaataagccacgtttaatattcgcttaccccggatatttaaacattatcgaaacgcaatttactttaccgtttacggaaaagccaccaccatttttaggttggtcattaaattggttagataacggttgttcagtctcaagactcaagagaatggcatgtaaaggaggttctgtagctaatctcgacttttcaagctttgattcgtcggtttcttcccacctcattagatctgcttttgacattgtcagaagtatgcttttaatgaatgaaactgaatccgaaatgcttaaacagttagaagattatttcatacatactcccctcttgatgtacaacacagtgcgagttaagcatcgtggcatcccatcaggtagtggttttacccaactgattggatcgattgttaacgcaatcagctgcgtttatgttagtaaactctcaagtgagtttcgcataatgcaagaccattgtgtttggttaggagatgatagcttcttggttttcgatcaaggcttatctaaagatgactttattgaaagttttctttccaacttttccaagttaggattaaacgtcaacgcagataaaactgaatatactaaacctagtataggatgttcatttgtgtttctttcaaggcggatgacctacggaaaaaccggaatgactcctgatttaaagaaactagcaggacaaatcacttggccagagttcaaggataagacacctgcagatacaatccagcggttgattggattggcatgggcatttggtttcaatgagcaagcatatcgcttacttttgaattcgtatgtacatgtagtcaaagaaaatcgaataagaagagtccagccagacttaagattctatcgacgatttcaattaatggactttagagacataaatctctctagatttccaaattttaatgagatttgtaacagatattatggtaaggattttatatcttag

SEQ ID NO: 1712 - DNA, 1476 bp, Saccharomyces cerevisiae partitivirus 3
  source 1..1476: mol_type = other DNA
atgttgcgaagaaactttgcaaacttttccgatcttaagttaggtggagggtttagtactaaaagagctgaactttccagatttatccaatatcgctttgttaaagaagaatattggcgagacgttacatcaagatccgctatggatgaaagatggaacgcttttcactcaccaatttcccaaagtgtggatgaatcgaaaatggacattgcgttcgaaaaagtgcttgatttatttcaaagtcactattccgaacctttaaacacggtaacaattgaagaggcaattcagcttcttccttcggacacctctgcaggcgctccgtatttacctggtgttaagaaaggtgaggttcgaaaccatctaaaagcaatgtcacgatatgcatggagaaaccttgaatcaaaaggtttcttgcccgttacacctgctattgcagcagcgagacggacaatccgtgctaaaggtacgaataaaccaagattagtttttgcttatcctggctatttaaacataattgaaacacagtttacagctgctttttccgagaacgctcccccgtttcttggttggtcagttaattggttagattatggtaccacttatgatgatttagttcgtcgaatttattcaggcagagtctggatgaatttagacttctcttcttttgattcaactgtatcagcttacctaataaggatagcttttcaagttgtcgaagaattaatggatctttccgatcttgagaaatctatgctcgatgaattaatgacttacttcattcatacgccattaagttattataatagcgtcgaatacaagcaccgcggaataccgtcaggttctgggttcactcaattgattggatcaatagtgaacatgctggcatgtgtatacgcatttgagtgctcaccggagtatggtgacctcgttttgtcgagttgtatttggcttggtgatgactcttgtctagtgtttagatacggtccacccaaggatgaagttgaagatttcgtaataccacatctccgacgattaggcttacaagctaatccagagaaaacactgtataattttgtatcaccttcgatgcaatatcattttctaggtcgaaaggcctttctcggtgttaggtattgggaagtcgatctggacaagctccatgcgcagatctgttttcctgaatttcaggataaatcgattagcgacgttatccaacggttaattggattagcgtgggccttcggatgcaacttagatgcctatgaggtgttgaacgaggcttatgacttctgttcccgttataaacggaatgaaattgaagataagataaattataagtcacgacggttgctacagatgtatggcattcaagatgtcaacttatctgttttccctagctatgaagagatttgctatcgttactacggtacagtcttgtaccccccaaggttaatatttgagtattgctgctaa

SEQ ID NO: 1713 - DNA, 2244 bp, Sarcosphaera coronaria partitivirus
  source 1..2244: mol_type = other DNA
atgcccttcaactccgtccgtaactacctcgccgaacgcctccaacgcgtcgcaaaagaatggaaattcttccaatcttcacatcaagacactgaccgtacccaagaactcatctccgatgaagacacaaaacgctcctatgctcgcctctatcaaccgaatcgcgaagaaaaagaacgtatgctcaacactgaatactcgacactcgtcgaagctatgcgcattgacaaccagtctcgaaaccaaccgttcgaacttcaccgtccccgcactcccagtgatatcatcccagaatctcgactccccgtcccaggattaaaactcctccctcttgtctaccactccggccacgtcatacatgcgaacccgtacacctcaaggcctcttcaacccgacgaagaaaccgacaacgctgaatcctacctcccaggcgatattgactttggacctgacattgatgaacatctttatcaactaatcatccagaaatacccagaatatctgtcctacatcaacaagtactgccgccccgctggcacaacagatggaactttccgtgactttaacaagccacaagtcccctccgaacctattgatctccaacgaaaagaacacgtcctcaaactcgttttccactttcttgactgcactccttaccgacctattcacttcatcgacactcagtacaccaagacacctctcgttacaggtaccggctaccacaatcgtttctcttataaatcacgcgctcacgcaaaatactcgcaccccgatgagtattctgaccgtcctacctctaaaggctacttctacaatgcaacgtatgaacacgcccgtactatcattcataagatcaaagaatcaggtgctcccttcaacctctacttcgctccagaagatcagaatctctccgatgaacaaatccaacagtacatcgaccagcacaacgatttctttaacgactaccccaccctcctttttacacgtaatcacatctccgacagagaaaagactctcaaagtccgtcctgtctatgctgttgacgacattttcattataatcgaattaatgctaacgtttcccctcaccgttcaagctcgaaagccctcctgctcgataatgtatggtctcgaaactatccgtggctctaactgctacttggataatctagctcttcgctttgaaaccttttttaccattgattggtctggatatgatcaacatcttccacgaatcatcactgatatctattacaccgacttcctccgtcgtttaattgtcatcaaccaaggatatgctcccacttacgaataccctgactaccccgacctcaccccccgcttaatgtatgagaaaatggacaacctcctccacttcctccacctttggtacaacaacatgacgttcctcaacatcgatggcttcgcctaccgccgccaatatgctggtgttccttccggtttatacaatacgcaatacctcgactctttcggtaatctcttcctccttatagatggaatgatcgaattcggcttcaccgatgacgaaatactcgcaatcattctctttgtactaggtgacgataactccggcttcactaattggcccttaccccgcctttacgccttcatttcgttcctcgaagaatacgccctccgtcgctacaacatgaccctttccaaaacaaagtcagtcatcacctgcctccgctccaagattgaaactctcggctacagatgcaacttcggtcacccggctcgtcctatcgacaagctcgtagctcaactttgctaccccgaacacggtatcaagtttcacacaatgtcctcacgcgccattggtctcgcttacgcctcatgtatgcaagataagaaattttaccagttctgcaaagatgtatataccatgttccttccgttccaccgtccagatgaacgcgccaccctccaacttaggcgccttctcgctatcactgataacgatgatgtctctatctttacgtccgaccctccgtcctttcccactgaattgcagatttccactctcttccgttcctaccaaggccctttgtcctatgaaccaaaatggaattatgcccacttcattctcgctcctgatgatctcgaaactcctatcatcgataacgactatgtaattgttcccccattcccaatgactatgtatgaatatgaacaaattcacgacattcctgtccgttctgctcctactttcattaatggttaa

SEQ ID NO: 1714 - DNA, 1395 bp, Scaphoideus titanus-associated partiti-like virus 1
  source 1..1395: mol_type = other DNA
atgaatgatgagaaaactgtgaaacttgtaaggcgtctacagccctacagtattgcatgttcgggctccaatgaagatccctttgtgagagccattgtgaatgactgtgttgatagtgaaacattggacagactaagtgaatacactcgtggactttatagtacagagttacactatgaaagttttatgttcttcaaccgaccagttaaggatgataacctcttctcgactagagttacttcccatcccagtttccagccggccctgcagcagacacgagatcaactatcttgtgttcgaggtactagcatcatacgaccagatcatttcgacgaggtctcgtggattcctagttcagcagcgggatttggatacgttggacttaagaaagacaactatcttttggctcggaagaatgcgacgagagccctatatggcttttctaaatatagagactcataccgtttcgtgcccgacaaagcgtacgcacgaacgcagcttgcattacgtgctaaccctaagattagacatgtttggggacgtgccttccaccatatacttattgaaggattaattggacaacctcttattgataagttaatgttgaatgacacgcctatatacataggcagagatatacataaagacatgccctatgttattttgaaagctatccaagatggtggtacctgttattgcattgactttagtaagtttgatgcttcagcgtgctccggtctagttcatattgcatggactatattgcatgaactcattgttattaatgatcatgttgatagattagttttcgatttttgttattcgttgtttacaaatactcctgtgataatgccagacggcaagttatttattgttagaagtggtgttccttcgggatcgtattttacccaactaattgacagtattgttaacatgttaatgataaacatgctttgttacacaactagtgttagtttccctagccttaaggtattaggtgatgattcattgtttgtaactgaagttcctatcgcagaactgcccgaaatcggtgccttctttgctcaatttggacttactataagtgacaagactgttataacggaaaactttagtgaaatagttttcctaggacataatttctacggttcacgtgtctgtagagatgaatttacatgtctatccttagctctttacactgaggatccaatcaccagcgctgttgaaagcgttgttcgtatcagtagtctactgtatgactgtggttttaattcttttgttttgcttaatttatataagcgtttacttagcacccaccatatcaattgggacctggaggctgtgagacccgcatccgtccatccaccttttgttaaattatttgtgttaggttaa

SEQ ID NO: 1715 - DNA, 2115 bp, Sclerotinia sclerotiorum partitivirus 1
  source 1..2115: mol_type = other DNA
atggattctatccgtaacatctttcaagaactccgccaaacaaatgttttggaatggaaactcttccagaaatttggacagactaccacgaacccgacctactcgcaccccgacgctgacctccgacgaattcaagaaaccttccgtgacccacatctcgaacgctcacaaactcaagaattcaaactgcattataccgacacttactctggcttccgcgaatccgatctctccaaaaatgaagacttcgaattctacaaacccattgacccgtcatctatccccgcctcaagactccccgctcctggcatctccgtacttccaatccgtacgcacgcagaacaagtcatcaccgcaaccgaacaagtccccgaaactggttatcaactccatccccttctccgtcaccttattgtatcaaagtatcccctttacatgcaacacgctacaaaactctgccgaccacttggcactactgacgctaccttcgacgatttcaatcgcgaacaaaaacagtatcctccgatcgaaccagaacttgctctccgcattgtacgcatcataatccacttgttatacgcacttccttttcttcccctccactacatcgacactttcttttgtaaaatgcccttgcacactggaacttcctacttctaccgacattcttacgaattacgtacccacgttgccttctcagccccttccgaatacgaaaacaagcaaacctctaaaggttacttctttaacgctttcacatcatgggcccgcaccgtcgctcacaggattaaagaatttggatatcccttcgacccgactcaactcactccttctgaaattacagacaagttacgctccttttttatggaacatgcaactatgctcttcactcgcaatcacatctctgaccgcgatggcgcattaaagcaacgacctgtttacgcaatggacacactctttttgcacttagaagcaatgattaccttccccctccacgtactcgcacgatcttcccgatccgccataatgtacagcatggaaacaatccgtggtggatgtgcccgaatggacgcacttgcatcctcatgccaatcatatttatgtattgactggtcctcctttgaccaacgcatgccttggataatagtcgatctcttcttcactctcttcctcccactcctgctcatcatttcacatggctatcagcccactgctgaatactccgaatacctaggactcacccccgacaagatgttctcaagactcttcaacatcatctcattccttagactatggtattacaactgtgtcttcgttactgccgatggctacgcttatgtacgccgctttgctggcatcgcatctggtatgcttaacacacagtacctcgactccttttgcaatctattcctaatgatacacgctcttttgcactttggatgtaccaatgaagaaattcttgactttatctatttcgttatgggcgacgacaacgtcatccttacgcaatggacaatcgaccgcctcttctctttcttaaccttcttcgaatcacactctctctccagatttggtatggttatctcgaccaaaaagtcagtcattacaagcctacgctcccgcatcgaaatgcttggttaccaatgtaactgtgcaactccgaaacggcctatctcaaagctagtcgctcaactctgctacccagagcacggacccaacgacaaatacatgtcgtcccgcgctgttggaatggcatgggcctccgctggctatgacgctgaattctttgccttttgcaaagacgtccacaccctgtttactccgtttgcagctcctccaagcgaacagacaacacagactattttgaaacaccttcccggtttattcaaaatgctcgacgacgtcacagaattcacgaatcctcaggctttccccgacatcatgaccgtccgcaaccggtacgccacttggcaaggtgaactctcacccgacaagaaatggtcccgcgcgcacttcctccgccggcctgatgatactcccctccccttccagactatgtttgaatacatgtccgaacatggcatcacattccctgaaccgcaacagctgttctaa

SEQ ID NO: 1716 - DNA, 1664 bp, Sclerotinia sclerotiorum partitivirus 3
  source 1..1664: mol_type = other DNA
tggtttttccagtttatttccttcttcattttcgaaaacaatacatgaataaaaatgtaatttacgatgaccctgtcgatgcggttgaaccgtttcttggtgacaacaaagaaacgtttctactctgggatgctagttcttcatcccgttcaagagttaccgctaacaccgactttatagaacagcccggcctaaaggagatagctaggtatggtggttactccacttactcagctcctggtaacacagatccttgggtgcgcttggcactaaaaatacatgaccgtgaaagatatgatcgcatttacggtttcacccgacgaccagccggtctcgagggcatgtacaaagcactgttccgcttcggcgaacaagttaacgaattcaagagtttatcttttgatcagcgcaattgtatgcgctcagcaattaaatccgctcgctcggctttccgtttaccggtaaagcacgaacctcttgagtgggaagaagttggccagtatatgcgccacgacacttcagcaggagtgaccttcccaggcaagaagaaaggagaggtggctgctcagatctacactgaggcacgttggcttggacaccgtatgaagcaaggaggtaaagagcgattcgatccacgtaaggttcggttcccaccgtgtttggctgcacagcggggacacctgtctccgagagatgatccgaagacacggcttacgtggatctaccccgcagagatgttagtcattgaaggcctttgggccccagtgatgtaccatcagttcatgagcttgcccaatgggccgatgctatgcgggaagagttcacaacgcttgtataccgagtggattgtgaattaccgagaaggggagaagttgcacggcttggacttctcagcatttgattcaagtgtaccacagtggttaatccgcactgcatttgacatactgcaccaaaacgttgattggttgaattggcgtggtaaacccacaacaaaacgatctcgccaaaagtggcgcaacgtatgggatggtatggtttggtactttatcaacacacccatcttgatgccagatggccggatgtttcgaaaacgtcgcggtgtaccatctggaacctggttcacttcgttagttgactcagtagtcaactatattatcgtcgaatatttaacgaagtgtcaacaagtggaggccaaaaacctgaaagttttaggtgacgactcagctttcaggtcaggtaaagcacttgatctcgaacagtcacaaaaagatgcagacgtactaggcatgaacttaaatgtcaagaagtgcgatgtgactgaagatccgaccgagttcaagctgcttggaacaacttatcgtaaccaacgcgcataccgcgaggacgatgattggttcaagcttttgctttatcctgaaaatccacctccagacataggcacgagtttatctcggctggttggtttatggataggtggtgcgatgtggagccatgaattctgtagattcatgacattttatcaatcctgctacgagtgtccgacggatggcactttcacaaaggatcaaagaagatggctcgaaatcatccacggcggcagcgcccccagaggctggacatcgaagaagtccttattctggagatcgatattttacacgatctaa

SEQ ID NO: 1717 - DNA, 1743 bp, Sclerotinia sclerotiorum partitivirus S
  source 1..1743: mol_type = other DNA
atgcctgcccttaacctacgataccttttctcgatctctcgatctgagatgaagaagattcgctcttctcacacgaaggtctcaccacgtgaagaagcaactcgcttctcaattttaaagcacgctattctcaagcacggttcagtcggccttctcaatcaagtccttctcggtaaacgtcgttctgacgcttctgatgaacgtctaattcaagactttcatgaattcgaacaacctgttcaccctgtgccacgagacaaacactacctacgcgcactacgagtcactgaaaagctgatgaaaccagcaaagactctacacccgatatctttccctgatctaaggtactatccttggacaaagaacgtatctgctgaggctccgtataacttcgaaaagaagtacgaagaactactcagagataaacaacgtctgggagaaatcgaaaccgccactgccaccttccacaatctagaagatgaaatcttcgaagataaccgctatcttattcacaagataaaagaaggagactcccaattttgggataaagacggaaaaccgcgcccttactatcacaccaccctacacgcaagagcacatgttgtaggacacgaagacgccgataaaattcgagctgtttttggagttccaaagctattattaatggctgaaaacatgttcatctggccactacaagcctactatctcaaccaggatacgaccaaacatcacctactctggggaaacgagataatgaaaggcggctggaagaaactctggggacaacttcaaaatggaagaatctctagaaccatactctctcttgactggtctgagttcgataaacgagctctacacgaagtgatagatgacgtccactccatgtggaaatcttggttcgacttcactcactatgagccgaccattttctacgaaaaaggagagattccggaaccacaccgtcgaatcgaaaacctctggatatggatgaccgacatggtcaaacactatcccatcctccaaccggatggaaaggtttatcaatggacaagaaacggaattgcatctggattccaacagacgcagctcctcgattcattcgttaatatgattatgcttttaacagtactatcagcgaacggaatcaacattgaacatcctgacttttggatcaaagttcaaggcgatgactcactcatttcaatcgtcgaacgcagatttcaaatgttcggaatttcatacctagatacactagcagacctcgccagctactacttcaacgcaaaactctctgtgaagaaaagcttcatctctgacactcctcaaggacaatacgtacttggttacttcaaccattacggtataccctatcgtttagatgatgatctactttctcaccttgtgttccctgaacgtcctcaacgacttgaagaaaccgccgcatcatgcgtcggcatagctatggcctccatgggctgttccaaagtggtctattccatttgtgacgatgcatacacattcattaccaaaacactgcgacgacctgcgaaagctgggtccctattttggcttgaacgtgcattcggttacgaaatgccaaacatcgcaaagatgccaacctttgaagaatgtctgtacgctagctacgacatccctgttcgaactgagaacatgaaacaaagattgtggcctaccaatgcgaaagccaagaacggattctactttctccgtcacttatgttga

SEQ ID NO: 1718 - DNA, 2029 bp, Scutellospora partitivirus A
  source 1..2029: mol_type = other DNA
ctccgatcccgaacccgaactcgatctccgccgactcaattactcataccgtcaacacgacattgaatctcaactcactgccgaatatcgtcaacactacactgacgcccgttatgcctttgaagaatccgaccatctcaaagatgaaccttacgaattctacactccaagctctgatcccatcccagataaccgcctcccagctcctggcattcgtgtcctcccaatccgtatgcacaaagaacgcgttgttaccgcaaccgaacaagttcccgaaaccggctatggtttacacccacttctcgactatttgctttcctacaaatacccgcgctactatgaacacaccgtcaaatatgctcgccctcttggaacaactgactctacattcaacgatttcaaccgcgaacaaaccgaataccccgaaattccaactgacctcatgtcccgcatccttccgctcgtttgcatccttctaaatgctaaacctttccttccacttcactggatcgacactttctttacccacatgcccctcgttacaggcgtctcttacttctatcgacactcctacgaactacgaactcatgctgccttttcctcccccaaagagtataaagatagacagacctctaaaggctacttctttaacgctttctcggaatggtctcgcacagtcgttcaccgcataaaagaatttggctaccccttctctacagaaaacctctcccccccagaaattcttgataaaatgcgagttttcgtcatccaacacgcaacctccatctacacccgcaatcaaaactccgaacgcttaggtaaccttaagcaacgacccatctacgctatggacaccctcttcctccatctagaatgcatgattacctttcctcttcatgttatggctcgctcgattgattccgctatcatgtactccttcgaaactattcgaggtggctgctccttcatggacattcaagccaaaaagtacaagtcgtatctctgcatcgactggtcttcctttgaccaacgcatgccttggatcatcgtcgacaccttcttcactcgtttcctgcccttcctgctcatcatctcatccggatatcatcctacagcagaatacccagcttaccctgaactcacgtccgacaaaatgttccaacgacttttcaacatcatcaatttcctccgtctctggtacttcaactgcgtcttctacgtcgctgatggctacgcctacgtccgccgctttgctggcatcgcatcaggcatgctcaacactcagtaccttgactcctactgcaacttggttctcatgatccatggcctcatccacttcggatgttcagatgaagaaatccttcagatttgcttcttcgttatgggcgacgacaacgtcctcctaactcactggcccctctctcgtcttcagtccttcctcgactggttcgaagctcacgctctctcgcgcttcggaatggttctatccagacagaaatcgatcattacccaaattcgcactcgcatcgaaatgctcggctaccaatgcaatggtggtactccaaaacgttcgatccctaagctcgtcgctcagctatgcttccctgaacgtggccctgatcccaggtacatgtcttctcgcgcaattggcatcgcttacgccgccgctggctcagatcaaacattccacaacttttgcaaggacgtctatctcacattccttccttaccaagctgacatcaccgatgaatttcaacgcgccaaggcgatcaaagatctccccggctatttgaaagtcctcatgctgtacgaaccctccttcgacatcaatctctccgaattcccctcaatccacactgtccgctcacgctatcagatctggctcggtgagcttgaacaagattcgaaatggaacccttcccatttcctcaagtccccagacttcgttccgccctcaccacaaaccatgcaagaatacatggacgaacactccctgtcattctcagctcccgctgatctctttgcttga

SEQ ID NO: 1719 - DNA, 1596 bp, Scutellospora partitivirus B
  source 1..1596: mol_type = other DNA
aagcattgtctccctgaaatcgctgaaaaagctattaatggattccgacgctctaaaggttcccctgttgatatcgaaatcgacttcaagcgaactaaccgcaaatactttcctgtaaaacgtgattatcactatcatcgcgccctccgtgtcgttgaaaagctcttccgtcctcacagaaaattgcaccctatcgccttccctgatctaaggtactatccttggactctctccgtttccgctgaagcaccatacactctctttccaaaatatcaagatctcctccgcgaaaaacaacgcgatggcgaaatctctgataatcgtactagttttcataatttttacaatgaaatctttaacgataatcggaaattaattcacgatataaagaaaggttatccccaattttgggataaaacttctggtcttcctaaaccttactattttacaacattacacgcccgatctcacttggtttcctctgatgagcctgataaactcagagctgtctttggtctacctaaactcttcttacaagccgagaatatgttcatctggaatttgcaacgcgaataccttaattatgatgacaatcctatgctttggggtttcgagactatgaaaggtggttggcgaaaactatttcaccgaacctctcacaagcgtattaatgctgttctctcaattgattggtccggcttcgaccgccgcgctctccatgaagtcatcgatgatgtacatcatatctggcgctcctggttcgattttactctctacgaaccaaccaacttctaccctcatgcaaaacccgatcctgaagaaattgaaagactttggcaatggatgacttatctagtcaagcactatcctgtgctcactccaactaacaaactctatcaatggactcacaatggtatcgcctctggattcatgcaaacccagcttctcgactcctttgtcaactcgatcatgatacttacctgcctctctgccgccggtgtcaacatcgacagcgaaaattttcaatttttcgttcaaggtgatgactcactatgtatctttgccgaacaactctacactttgtacggtcaaacattttgctctaaaatcgccgaacttgcgagaaatcgcttcgacgctaaattatctgttaagaaatctagattcactccttctctagatggacaaacagttctacactacgatactcgccacgaaggccaagccttccgtcccgatgaggaactcctagctcacttactctaccctgagcaccctcaagatctatctgcaactgctagcgctgctattggcatcgctcaagctgcaatgggctgttcacatcaagtatataatacttgtaaagatgtatttaattttattaccaacgaacttggaactaaagttaagtatgcatctcggttatcaaccgaacgtgaacgtcgtaatttacctccactacctactaagttccctagctttgactcaactttcagtcaaaactactctactgctgtcagaacttactctgaaaagcaaagaacttggcccactgataaaacatcagctggtggattttactttttaaataagtaa

SEQ ID NO: 1720 - DNA, 1791 bp, Setosphaeria turcica partitivirus 1
  source 1..1791: mol_type = other DNA
atgttaaacaacctcgtcctcggcactaaacgcggcctagcgaaagcaattcgtggtaatattcaagacaatcatgtcattgatgcataccatcacgtagtgctacacgcgctcaaccgcttcctgccccagcacgaagtccacgaaatagttcatggataccgtcgatcagtcttcaatgaagattcgctcaacgctgatattcagaaactcaattctgaagaacattccgtccctaaagacgaacactattggaatgcaattcgcaaagtccaacagatcttcactcctgaaatcaagctacagcctattcattttgctgacctccgacactatccctggaaactatcaacaagcatcggagctccatttgctacaagcaaagaatggaacacctatgtcgttgacaaatttcatggctacgaaaatggattcgatgaaagtacctttctaaaacactaccatcgtgatctattcgctgaagctcattccggcatctctctcgatcctcccatgatcgacgctcgaatgtctaaacgaaatctctacaatgagatgtttttcattaaccgtaagcatattcacctcatcaaggatggacgcaaaaccaacgacgctggacacgatctacgttattggcataccgcatttgcacgacaacacctcgtcaaacaagacgaccctgacaaagtgcgattggtatttggcgccccttctactagcctcatggcagaactgatgttcatatggcccatacaagcatggcttctttccctcaaggaacgttcaccaatgctctggccgtttgtaaccttaactggtggctggcatcgtctagtcaactgttttcagaaattctgtccctcattcgggttagttgcaaccgtcgactggcgcggctttgaccgctacgcacgacataccgttatcagagacatccactctaatatcgtaagacctatgtttgatttctcaaaaggttatcacccaacccgtgactaccctgagactcatgacacaagtcccgatagactggaaaatctttggaactggatgtgtgactcagtcttgacgacacctcttatgcttccagacggaacccttattcgtttccaacactccggcattttctccggctactttcaaacgcaacttttggattccctctacaacctagttatgttattcaccattctctcaagaatggggttcaacttagacaacgtctacgccaaagtgcaaggtgatgattccatcatctgcattatctgctcatttttaatggtctcccattggtttatatcaatgctcagacactacgcagattattattttggtgcagtggtaaacgataaaaagaccgaagtgtccgactcgctcgaacacgtcgaagtcttacgttaccgtaatcgcggcggaattccgtatcgcgaaagaaccgagctacttgctcagctctatcaccccgaaagagcaataacatatcaggccctcatggctcgaaccattggcatagcttatgccaattgtggttccgaccccctggtttaccaaatatgtgaagacattcaccaatacctaagtaacctgggagtcaagcctgaccccgctggcctaccatcaggcgtacgctttgtacaggattatcttcctggacagacgtcgattgatgtacagcggttccccagttacttcgaaactgtttctcgtctcctagatggatacgacgaacagccttccgaaggatattggcctcgttctcactttatcggtattcccggtagaacttga

SEQ ID NO: 1721 - DNA, 1274 bp, Sichuan mosquito associated partiti-like virus
  source 1..1274: mol_type = other DNA
atgagcaaaaccgacgcgtttgaaagggaactagcatgtggttgtacacgtattgtactacctagtgttccacccacacttgagcgacattctgcaagatgccccgaagcacagatacgccgctacatggcccctcatccattcaacgtcaacaaagaacgaatggataacgcatttggcaagacattgtcttggttcaaatcgaaattttcacctgttagagtataccatcctttggatgttctcgacacattgtctaaaccgacaagccctggtgaatattttaaacaaaagggatacgccaccaaaagagacgtcatatcagatcagagaggaattgacctactacgtacaggaatatcgtacatgaaaagaggaattaccaaagctgacaggtacaggacattagtcgttgtaactgatgcgtcatcagaaattggtaatcctagcaacgtaaaatcacgagttgcttgggtatacccacttataatatctgctgttgaaaacatgttctataatggctttaatatccaactaccagatgattgggttccgaatccgaccactcatcacaagagatactgcggaaagaaatcaaaatcgatggacttttcaaagtttgattcaagtatccacgccaaattaatagacatggcattcagtataatcagtagtcttatcatgttcgatggctattatgtaggttctgacggagagacttatggtacatataagatcaaggaaatcgaacggctctggtctttcatccagtactatttcgtatatacaccattctatacgcaagccaatcctaatacacgtagaaaacaccacggagtaccaagtggtagtatgtttactaatctgatcgatacgataatatcgcgtatagtgaccatatatatgcatgacggttgtgatgtaacaacatatggtgatgacgtacatgtagcgcagtgcaaatgcaatgaagatcgcctagtgtgtgaagctgcctcaatgggtttaaaggttaagattgaaccgcctaataagcatggatgtttgacgtattgcaaaaccgagtgtcatctagggcatcctttccaccctggaatatggtttagcaatgtcttaaacaaagcacgaacaaaatatatgaaaatggtcgtagaatgcttgatgcacatgcaaccgacacatgaccaacttgcatggctccaaaagaagtacaagagccttcgtagcattccatatcgtgtacatgctcgactcaaactatggctggacaaaat

SEQ ID NO: 1722 - DNA, 1717 bp, Sichuan mosquito associated partitivirus
  source 1..1717: mol_type = other DNA
atggataaaattaaaacacagattaaactgaaagatgaaggaaaagatacttatgaattatttgaattactagacgtcacaagactacctagatgcagaatacctacagatggcatcaagatcgtacctctaaaataccacagacagaaagtcgaccgtattcccgatgaagacgataatgtcggagatgaaacacatcctgatatccacgataccatacacagaaagtacccgaaattcattccagccttaacaaattggtgcagaccacatgcaacaactgaggcagttttcagagatttcaatagagcacaatttccagttaaagaagtagatcctcaaagactacagactataatggaactcatactttgggctttagacgtgaaaccttatccagtacttacatttaatgacgtccttttcgcaaaattacctcttaatacaggaacaggctactatcataaaagaagttacgccgcaacatcacacgcgaaatattcatctccagatgaatacaaggatttaaccctctcaaaaggacatttcattaattaccactatccattattccactcacacgtacattcaattaaaagacatggactaccatttcgaattgataaacaaccaacaactagagaagaatggaaaaagatatcgatacgattgcagtattattttaactgcagaccaaccaacttatacactcgcttacacatatcaaaaagagcaaaagacgagcctaagaaagcacgaccggtatatggcgttgatgatggatttttacatcttgaagcaatgtacacattacccctaatcgtacaagcccgtaaaatgtcttgcgctatcatgcatagcttagaaacattacgaggatcaaaccactacttagaccaagtcgctcaggactataaatcatacctaacaattgactattcccgatttgaccaaacagctccaagagttataacaaacaaatattttacagaatttctaccgagactcatttttataaatggtccaacacaaagaactatagcttatccagaaggcaaaggccttttaaaagaaagctacttttatagaacagtaaattgtttacaatttttacacttatggtataataacatggtatttttaaatgccgatggttatgcttataaacgaacatgtgcaggtgtcccatcaggactactgaacacacaagaattagacagtttcgtaaatctattcgttgtttttgacagcctactcgaatatggcttagactcagagacgattaaaacatttagatttttcgttatgggagatgacaactcaattttcaccccactagacatctatgaacttaataaaatttttaaatttattattcattacgtcaacgaacgatggaacatgactattaatggtgataaatgcatcattacagacaacagacaatacattgaaacattatcttaccaatgcaactttggcaggccgaagaagaatataattaaactttgcgcacaattatgctatccagaacatggaatagtagaaaaatacatgtcaagtagagcaataggattagcttacgcttcctgcggacaagataagacattctacaacctatgtcgagacgtttacgatctcttcaaagataaagcagaatacgatgataaaatcaaatacaaaatgactaagtacttaccaggtactattaaactat

SEQ ID NO: 1723 - DNA, 834 bp, signal crayfish associated partiti-like virus 1
  source 1..834: mol_type = other DNA
atggttgaaaagaggttcgcctatcctttgcagaaggctatggaaaatgcgccttttcctagatcatggggatctggatgggactggttcagtgccggtggtgctcaaatgtcaccttttattgatggtccttcattatctgttgattttgaggctttcgatcagtgcccacctccatggcttattcgtaaactcatgctgcgtatcatgactcttttcgaattaactgctcaggagaaagccatttttattggtattttacggtctcatttagattccgtagcccattataaagggcgtgatttcaaactcactggtggtgttagaactggtagctctttcactcatgtccttggcactttgttgtcggacatcttatgcaaatactacgatcccgactgtgagaacattacttacggtgatgatgtcgttatgcgctctgcttcacgggtaccacgcataattgactttttcgcccgacactccagcttttctatttcgttatcgaagtcaaaagtcggagttcattggctgggatatcagtggaccggggatagatggatacttgaggatccggataagagatgggcccaattcttttggcctgagcgaccttcttcgcctgtcgctagacttcagtgtatgctcctcaattgtttgtctgacccctgtcgtgacttgattatccgtgctcttatggagctagatggggataccgtcctcccagaaacgattgccttgatcggaggtcctcgttttcatgccgccctggacgagggtgttaatatcttctttgctgagcgttgtgttaaacgctttcatagattagattag

SEQ ID NO: 1724 - DNA, 1437 bp, Sinapis alba cryptic virus 1; identical to SEQ ID NO: 621
  source 1..1437: mol_type = other DNA

SEQ ID NO: 1725 - DNA, 2262 bp, Sodiomyces alkalinus partitivirus 1
  source 1..2262: mol_type = other DNA
atgcttgccatctcaactatcgtcgcactcaacgtgctactccgcttccaacagcgcagaagacgaaaacagacggcccaaaccctgacgtttccaatcagaaacattctttatgaatgggaaacacgcagatctatcccaagatcccaggagccctaccccatcttcgactactcgaagtccctcctcgcttacatcgatttggttacttgtcacaagataagcatccacctccatgatgaaatagacgctatacgcacaaagtatcagcaacgagatgaagactttgacctccacactgacgtccccctgtcagacattcccgaagatcgcctccccctagaaggaattaacttcgccaacaagcgatatcattctatcccttccggctctcagaatattggtgaaacgatccacgttgtccaactagactctaacttcgttgaagacgaagatcaccggtctaacatcctatttgaagaatcactcgacctttctggtgccccccctcaccccgagatccagaagatcatcaacgattggttcccccagtacgctcaatacctccgagaatactgccgtccaccatcattcggaccgcaagcctttcacgactttaacagagctacyccgtcacccccccccccctctaacgagcgacatgaagccatcatgcgaatcgtccgagctaaaatgaacatcaagccctacaggccctggcactttgccgatgctctagccgccgaaacgccgctgaatacatcagcttcctactactcaaagtacgacccccgtacccgagtcctcgcccgctactcctccccccaacgttatagtgatatgcccacatcgaaaggacatttcataaacgttatgcttaacgagttccgcctcgagttccatcacattaaatacgatggtgtacccttccccccacgccacgaaccctccgatgaactcaacgccggtaacgaacaatggatgtccaaacatccctcccagttgttcattagaactcaaatctccaagcgcaatcataccgacccgaagaagatacgccccgtctacgctgtagatgaccgctttcttcacattgagaagactctcaccggccccctcctcgcccagcttcgtaaccccgactgctgtgtcgcccacggccttgaaaccttccgcggatctatgaccctcctcgatcagatcgcactgctctacaagtgctatatctcactcgactggtctcaatatgatcaacgattaccctactatgtaatcgtcgcttactacctcgacttcctcgcgtccttgataatcgtatcccacggttacatgccgacccgttcctacccggacacctcgtccgatatcccctccttcgcgaaccgacaatttaacgtgctaatctacttactagtttggtacttgtcaatgacatttctgtccttcgacggatttgcctatattcgcagacacggtggtgtaccctctggactactgaacactcagtctttagactcctttggaaacatgtacatcattacagactgtcttttggaattcggatttacggaacaagaatgcctcgagatgcttttcgctgttttaggtgatgacaacctcatcttccttcaacaatatctagaaagagtgactgccttcatggctttcctcgatcagtactccaaaactagacacggcatggtcctatccatcctcaaatctatgttctccaacctacgatcgaaaatcaccttccttggatacgaaaacaactacggctacccctctcgccctatcggtaaactggtcgcacagctggcattcccagaacgacccgtccccgagaaacgagaatggatccacgctgcaagagccctaggcctagcctacgcctcatgtggacaagatcccgtattccacttactatgtaagatggtatatgataaattccgccccgcaattgcggtaccctcacaccatataatgaagatattcaagaagtggaaatttcaacttcctgactttgacattgaagatgtgacgtacacattccccgactttcccaccgtccataaaatcagacacgatgtctatggatataaaggtttcttttctgaaaccgataaatggaatttcgatgtgttcgacgtacccccaagtgacaacctcaccgattacgtgaccttaaaggactatatactcagtgaccctgatatgtccaacaccgtccacgaatattggcatggtaagagatccttttga

SEQ ID NO: 1726 - DNA, 1563 bp, Sodiomyces alkalinus partitivirus 2
  source 1..1563: mol_type = other DNA
ttaattgacgcactccacctcagacctgcaaagtctgggtcaaccactagcgaggacgttttgtcatccaacttcaaatcgccaaatctgagagaaatcgcaaagtatggcggatactcaacttactcgtctaactcgaatactgatccgtggattcgagagacgttaaaaatacacgatcgagaaacttacgaagacatctggggttacacccgtcgtccgcaaggaacacctggtatgtacactgccctaggtaagttcgcaggcgagaagaatgtattcggtagcctctcaccaaaccaacaatcttcgatgcgccgtgcaatcggcaaagcgaagaaagcgttcaaactcccatacaaacgggaaccccttgactggcatgaggtgggtcagttcctcaggcgtgatacgtctgcaggttcgactttcatgggcagcaagaagggtgacgtgatggaggagatctatcatgaagcgcgttggttaggccaccgtatgaaacaagatggcaaagaaagtttcgatccaaccaggatgaggtttcctccctgcctggcaggtcagcgtggtggaatgtccgagcgtgacgatccaaaaacgcgacttgtgtggatttaccctgctgagatgttggtggtagagggattctacgcccctctgatgtatcgtgactttatgaacgatcccaagagcccaatgttgaacgggaagagtgcgcagcggctgtacaccgaatggtgctgcaatctgaggaccggggaaacactatatggcattgactttagtgcttttgatacgaaggtaccggcttggttaattcgtgctgcttttcaaatcctccgacagaacgtaaactttgaaacatttcaaggtaaacctgtcgagaaggtggaagcacagaagtggcggaacgtgtgggatgccatggtgtggtattttattaatacacccattcttatgccggacggacgtatgttccgaaaattccggggtgtgccttccggatcttggtggacgcagatgattgattcagttgtgaactacatactgatcgagtatcttgcggactgccaggaagtagagatccgaaacctgagggtgttaggtgatgacagtgcttttagatctggtgatcaatttgatctcgagcgagccaagatcgactgccttccaacgggaatggtgataaagcctgagaagtgcgaaagaacgaaggatccttctgatttcaaactcttaggtacaaaatatcatgatttgcatcctttccgtgaaactaacgaatggtttaagttagcattgtaccctgaatcgagtgtgcgatcacttgatgtttcatttactcgtctcattggcctgtggttaggtggagcaatgtgggataggaagttctgtgaattcatggacttcttccaaactagttacccttgtcctgaggaggggtggttctccaaggatcagaaacggtggctagaaatcatctattcaggcaaagcgcccagaggctggactaccaagaagagtctgttctggcgttcaatcttctatacctatggttag

SEQ ID NO: 1727 - DNA, 1755 bp, Sophora japonica powdery mildew-associated partitivirus
  source 1..1755: mol_type = other DNA
atggcttccacaaatttacttcgactaggaaagatccctagatccaagaaacacaacgatccactcagtcgatccttacgaatcaatcgtatccgacaaggtattattaaacgcgcaatttacaaaatttgtccgattaatcttgctagacaggtgatctttggtttcaaacgatcagaaggtagtgacgatgttgccgaaacggactttttacggtctgatgttccttatttcgatatgaaaagagattttcattatttacgagctctccgagtttgtgaacgactctttcgtccctcaagaacattgcatcctattgcatttcccgacctccgattttacccttggtctctttcagtttcagcagaagcacccttttcagtagaaaagaagcggtccacacttattcgttctcgtcaatcagacggagaagatttagatggtagactcacatttcataatctctataatgagatctttgaattgaatcgaaatcttattcaccaaattaaagaaggtgataaatctttttggaataaagatggtactccacgaccctactggtacaacactctacatacgaggcctcatcttgttaaatcaagtgaacccgataaacttagagctgtgtttggtgtcccgaaactactactaatggccgaaaatatgttcatctggagcttacagaaggaatacttgaatcagaagattcagtctcctatgctctggggtttcgaaacatttaaaggtggatggttaaagatttggaacagaatgtattcaaagaagtgctcaacttttttgtctgcagactggtccggattcgatcgatttgctctcttcgagtgcgtcgatgatattcacagaatgtggagaaattggtttgatttttcaaaatatgaaccgactatcgctgaatcaggtcctcctggaattcaactctcctatcctaaatctaaaactaaccctcaaaagattgaacgtctttggaactggatgtgttactgctcaaagtacactccgatcaaaggtcaatctggccaactctatcagtggcaatacaatggtatcgcttctggttatcaacaaactcaactcattggatcatttgttaactcaatttatatgttaacatgtttatctgatcttgggattaatattgaatctgacaactttcaactctttgttcaaggagatgatagtttaactgaattttcagaaatcattcaaaaggatgatttacctaaatttttaactaatttagcgaaagtcgcaaaatcaagatttaatgccaacctctctgttcaaaagactacagcaggtgaatccttaaatgacgttgaagttttaagctacaacaatacatatggaattgctttccgtgatgaagctgagcttctagctcacttactttatcccgagcgttttcaaactctcgaagcaaccgtttcatgctgtattggtatagcctacgcatccatgggatgctctcaatatgtcgacgacacatgtctagacgcttataactttttgactactcaattcaaagttaagcctgacagcaatttcctacaggatttctttcgcattagaggttctcctctaactgacgattttcataatcctcgttttcctactaaggacgagtgtttcaatcaaaactatgaagttagatcccgatctgactctgagaaacaacgattatggccttcaattcctactggagattatggctttcactttatcaatgaatag

SEQ ID NO: 1728 - DNA, 1602 bp, Soufli partiti-like virus
  source 1..1602: mol_type = other DNA
acatgtagacatatgtcgaaaaatcgcaagcaagcgttcgcccgtttacctgatgcagcgggtttccctttcagccttttacctgcgcgtaaagacgagtgggctgaagaggtgtgctcacgtcactttggcgagagacccattgcaaaggtattaaatgagttacataggagtactattacgtatgacgctatgttagaggatctgaaaggatatgacgtggaaccagcacgttgcgtgcgcgatgatgcgtattacgccgtattaaactctatccggcaagatttctcacgttttcctgttatcatccctcttacgatgggtgcggttccccaaagaccagactttcccggtcagaagtctcctggattaccctacaaactacaaaactttgctaccaaagcggaagtcatcgaagcgggcaaacttcatgaaattaaccgcgattggcagaatataggcttcaagaaatgtagggtggagcttcctgatgtctgtctctttgcacgagcacaaatcgcacgacagggtagagaaaagatccgagccacctggggatacccgatatctgtatatctggaggaaggccgattcttttaccctattcaggatgccattaaggcacgtcatcacgaattcccaatagcctatggctatgagatggccaatggtgggatgcaagttttgaatggactgcttgggaggaatccaggctctaagtatttatgcttggactggaggcagttcgataaaactgtacccccctggatcatcagggatgtattctcattactggcggagaaaatagattggagtcacgtggaagatgtcgaaggtaagatctggccggttaatccggaaccctctcgacgtagatggaagcgtatggttgattatttcataaatactcccatccgcacgtgtaaaggagagagatttttggtatcgacgggtgtaccaagtggttcttgttggacaaatttagtagatagtctcgtcaacgcactatatgtgcgctacgcagtctttcaaaccacatcctcttttcctcgggacgagctgtatctaggagatgatggcgttgtaatcgtccaaggtactataaaccttcaggacatggcgcaggtttgcttagaaaggtttggagccgtattgaatatcgagaagagttacgttaccacacgcactgataacgttcacttcctcggatactttaataaagctggttatccgtttaagaatcaggactttctggtcgcctcttttatacaacccgaacatactagaaaggacgccctagatgcatgcgctgcaggactcggtcaattgtggagtggattcgatccatcttacgctgatacctggcgtaaagttatattggatgttgccgcaaaggatgggttgactcaagatcaagtcgttacccacctaagatctacagctcaccgtcataagtatcttatgcacgttggcctagatgcgagaaccctcacaattcctgcccctaacgagtacgggttaatactcgacgtccttccgaaatcgtacactggtaggttgcccccaagaagggtctactcccttgttgagctattcagctga

SEQ ID NO: 1729 - DNA, 1820 bp, Soybean leaf-associated partitivirus 1
  source 1..1820: mol_type = other DNA
ccggactcgttaacacaacacgttgttatagaaccatacatttctactttttggcctcccaaactaaagccaactgtcgatcagctcccgaactagtttttacgcacactacaaccatggaaaaagttgactcaccaatcgaatctctcgataccaacttcttcctcgaacgaacctccaagtttcgacctcacgtaccttccattgatcctttcgcaacagcaaagcatcagaagaccatacgcaaggctctcgaacgatactgctaccctcagcagatcgagaagatcattcatggccacatacgccacgaagtcactgaagaactcgtcctccacgacttcttcgcaggaaacgtcccagaccacccagtgcccaaggaccaacactacgaaaacggactcaagctcaccgctgaccttttccggcccccgcacccgtgccgtcccgttcacttgcttgacattcagcatcactacccgatgaagaacaagccgaacgccgaagcacccttctccactgagaagaaatacctggacatgatacctcctgacaccaaggcctcgaccggtaacatgaagccgattatcttcgactacactcgacgatggcatcacgagatcaaaaacggaacagaacctgagcacagacatctgtactacatgctccttcacgttaagactgctctcaccacaactgcctcgcctgcgaaagcccgctccatctacggaactcctaagccctttattttggctcagatcatgtttcactgggctctcttcgctcactacaaatctgtcaaaggctcatctccactcctctggggttacgagaccttcaatggcggatggatgcgcctcaattatgagttgatgcatcagtatctacgtacctcaatccttatgattgactggaaacgctttgataagcatgcactattcaccataatgcgcgacatctttaaggttcaacgcacctacctcgacttttctcgtggatatattccaacggaagactatcccgacacagcgtccgactggactcccgaaaaggcccaacgactcgaacgactctacgaatggactaactatgcattcgagaacactcctgtcctcctccctaacggtgaagtctactcacgtcgacacgccggcatcccttcaggattgtactgcacccagtacgatgatacaatgtacaattgtgtcatgctcctcaccatcttatactctttggaaattcctctctccaaagatatggtcatcaagctcatgggcgacgattctctcatccgactactcatcgtcatccctcccaaccagcacgacgactttctcctcaagatgcaagacaaagccgactactacttcaaatccattatttcggtggacaaatccaagatatccaaccgtccaaatggagcagaagttttgtcgtacaccaaccacaacggcctgcctcaccgcgaccccgacacactgctagcccaactgtaccataccaaggcacgtaaacccactcctggtaaaacaatggcccaagccgtcggcatcgcttacgcaagctgtggattcgacaagcaactgtatcgcgtctgcaaagatgtatacggttactaccactcccaaggacacactccggataaaactggacttgccctcgctctaggagacgaccccttcggtctagatcccaacgaaatcgttgtcgatcgcttcccctcctatcacgaaatacaagctaatctaactactttagactatgtcagctcgtcagttgaaagattctggccccaaggtcactttctctgcgactactag

SEQ ID NO: 1730 - DNA, 1810 bp, Soybean leaf-associated partitivirus 2
  source 1..1810: mol_type = other DNA
aaatcagaacggaactgagacaaaatcaaaatccaacaacaaacaacatacacataacacaatgcacgccacgaacctacaggttgtcggtcacctaccgaagaacacaaaggttttcgcattccatcagacgcgtcaagacgccctgaggaacatgagcgagaaattggttaagaaggcaattcacatggaatgtacacctgagttggctcaacaagccatccatggatacagaagatccaaaggaggagatgctatcgctgaagaagacttcaagaagtcagatcagccctatcaccccgtcccgcgcgacttccactacaggaaagcactcgcaacatgcgaacgacttttccgtccatcacgccgtctcaaacctatcgctttccccgatctaaggtattttccttggacactgaatgttagtgcggaagcaccgtactcttacagtcagtactgggcgcgagaactcagacgtatgcaggcagaaggaatcacgcttgacagcaagccaaccttccataacctctacgatactatcttccacgttaacaggagccacatccacagcatcaagttcggcctgtacccattctgggatcaggaaaccggtgaaccaatcccgtataagtggaacacacttcatgcgcgatctcacacggtaaaggcagacaaggacgacaagatccgagcagtattcggtgtgccaaagctcttgcttatggcagaaaacatgtttgtctggaacttacaaaaggagtacctgaacaaacgagttaaatcaccaatgctctggggttacgagacattcaaaggaggatggcagaaactctggcgagatttgttcaagacgaacttctcatcagtactgtccgctgactggtcaggatttgaccataacgcacttcacgaagtcatcgacgacgtccaccgcatgtggagatcatggtttgatttcgatcaaggttacgagccttcgaagtctgacacccatgactaccacgcttcacagacagaggaatggaagatccagaacctttgggattggatgacgcactccgtcaaacagactcccatcttaggattctctgggaccatctacaagtggtcgttcaacggcatcgcttccgggtttcaacagacccagttgctcgactcgttcgttaacgcaatctacctactcacatgtctatccgcacagggcatcgacatcaacgcccctggcttcaacctgttcgtccaaggagacgacagcctgacaaccttccaagagagggtatttcaatttggagggaaaacatttctccagaagctagcgaaagaagcaaagatccgattcaatgcaattctatccgtagacaagacgtcacacggaacatcactcaacgacgttgaggtattgagctatcggaataaccaaggaatagcaacccgcgagccagcggagttactttccaaactactgtatcctgagcgagccaaacgactcggaggaacagcagcctcagccatcggaatagccatggcagcaatgggatcatcccgacaagtctacaacacatgtaagaatgtctatgattttattgtcaacgaactccacgttgaggttgatttcaaggagtttagagcgtacgcagctacgcaccgttcggcagctgaagaagcgctgagcttacaaccaacgtacttcccgacattcgaggagacacttggatacaactttgactactcagttcgaactgagagtgagaagcaacgcctttggcctaccaaaccaaccggcaatggctttcacttcctagttgattga

SEQ ID NO: 1731 - DNA, 1804 bp, Soybean thrips partiti-like virus 1
  source 1..1804: mol_type = other DNA
atgttagaagaaacgacgctagaggatcaatacgttgaaattagagatttcatcgaagagaaaagtctttctgatttagaaagatggagaattattaatcaacatgatttacgagacgaagacggcaatatagacgaagagctatatgcatactattataaattagaggcccaagagccaaaaataataagttacgtaaacattcaatcatttatcaatgatgtcaaagcaattatggaatcttatagattaagagatataaaaagaggagaaccattcgaattttatagaccaatgattcaaaaagacagaatgcccaatagaataaatgttgaaccaggaattagattattacattacagatatcacacaaatcaaccgatttatgctaccccggatttaccagaatcaggatttaaaccagctaaagctatttgtaaaatagtcaaccaattctttccacaatatcaagtatatcttgataaatattgcagaccactaggaactactgaaagtacatttatcgacttcaacaaagaacagaaatgcacgaaagcactaaatgaagatcatacccaacatgtactagtattattaaaaaagtttctcaattgcaaaccttacctaccagtgtattatgaaggcactcaatatgccaaattaccactatcaacaggaactggatattacgacagaagtaattacagaacaagagcacttgcaaaattatcacacagtaaagtctacgaacacaaaccaacgtgtaaaggctattacttaaacgccacttataaagagcatcaacgtttaatacataatattaaacattatcgatgtccatatttactaaaagatcgaagtgaagaaaacagaaatcgaattgtagcaatgatgtttgcccaaagagcaaccatgttatttacccgcaatcatatatcagtaccaccaactttaaaagtgcgaccagtatataatactgatccattatttaataaattagaagtaatgctaacattgcctttaattgtacagatgagaccaatagagtcatgtttgatgtatagcttagaaactataagaggaggatgccataaactagacagtttagcacaacaatacgattcatatttcactattgactggtcatcatatgatcaaagactacctagacacataacaaatgtgtactatcatcaattcttagaaagtttgattatagttaataaaggatacgccccgtctattgattttaatgaaccattcaaccctgaacaaacacaattcatgtttaagaaagtgtctaacgcactagaatttcttcatgaatggtataattcaatggtattcgtaaccgccgatggatacgcatatcaacgaacacaagcaggagtcccatcaggactatttaacactcaaatgttagattcctttgcaaatctatttctcatacttgacggtatgataaattacggatttagcgatgaagatattctcgatatgagattatttatcatgggagacgataacacaggatttacccgattaccacttctcaaacttgaaaaatttatttcatggtttgaaagttacgcactagaaagatggaatatgaagctttcaacttcaaaatccataatcacgaatttacgacaaaacatcgaaattctcggatacaaatgtaattttggattcgcaaaacgcgatataggaaaactagttgcacaactagcatatccagaacacggtgtaaaacctaaatatatgtcatacagagctataggaatagcatacgcatcagcaggac

SEQ ID NO: 1732 - DNA, 1710 bp, Soybean thrips partiti-like virus 10
  source 1..1710: mol_type = other DNA
catggatacgattagaggacataagctaaattttacttatgaactaggtattgcgagaacggagaacgttcaacatggacgaaaacatgcaatacggaatcccacgtttcctggaagaccggcacattctagcgatttagatcatcgcttggcacgatcgacagggtctgaactggaaccccgttcaggctttggatttaatatggagccgccctatccatcttttaaaactctgagagccgcatataatgctggccttggaggaattgccgaacgcgtcattagtactaaaaagagatcttggatcactaatgatgctatatgggatggagtattgaagtttagttaccccaccaccaagacacacgactgcacagtgtatcgtacagttttgcgtcagctaagaagggaattcaaagtagatcagaaagtaccacttacggatataaatatatcaagaagtagaatgccgcaaagtacttcacctggattaccctacatacaacaacaagactgcaaaacaaagggagatgtactcgaacgagactttgaaaaattcgtacaaaaatgggacagagttggaaaaggttataacgttgattttccagcttgtgcagcattcgcccgcagccacatcggtaatttagatgtaaataaagtccgacctgtatgggctgtcccagtcgaaataattcttcaagaaggagtgtttgcctacccaattatagacgagcttacatcacagcgcataggtgagcatactgcatatggaatggaaatgatgaaaggaggaatgcaatggttaaatgagcaagctttacagtaccggatgaaatatcctggagctcaatttattcttacagactactcagcctttgatagtagtattccagcatggttgataagagattgcttccgcatcattgaagagaagatagacttttccagaaaacagacgtctaatggcatagttgactgcaatgcgaatcaagaaaagcggaaatttaaaaaggtagtcagctattttataaacacaataataacttgtcctgatggacggacctttaagaaagatcatggtgtaccttcaggtagtatgtttacaaatattatagatacgatggttaactttatcgtcacaagggttgccgtccgctacaaatgtggagtctatcccacttttgatttgtactttggtgacgactcactagtcgcagttccatcaaacatccttattaatttggatgatatatcagattttgtaagaaggatttttggaatggtcattaatccaaacaaaagctattacactgataacgtcaaaaacatacatttcttaggatattacaatcaatccggcacacctaagaaaaccgaccttgatcttttcgcgtcaatgttatacccacaatacaacaaagatgaatggtcatatagcttatcaagagcactaggttgtctactcgccagtgcgggagctaatcctgacattttccacatagcacggaatctgtaccatatggctctcaattcaaaaccaggtgaaactgaagttgataatgctatagcaatgatacgaaccaatccaagaatgaagagacacttggaaacgatgggttgtggtgacatcccactaacacgcgatttcttttcggactataaaatgtcggtccctgcagctaactgcacaaagttaatgaagaatatcag

SEQ ID NO: 1733 - DNA, 1613 bp, Soybean thrips partiti-like virus 11
  source 1..1613: mol_type = other DNA
cccgtacgctgatgctaaagatgggcctggcgagcatgactaactcgttaaaactaacaacaccagcattgaagtcactactaccgggggcggggttcacttttaactaccgaccaagccggttagatcgcaatgctttgtacgcgctaaacagagtcctagacccaggaaaaaccgctgaggttcgaaccaaatatcacagggcgcacttgaatttagatgatttaagggcggatttacttgagtttggagcaccgaaagcgaaacgacaccacaccaatgcatattatgcaattcttgagtctgtcgacaagtctctgtttcctgattcaaacgctaagatcataccttggacacatggatccgttgttgcatatccggattttcctaaaaacaaatcaccaggaataccgctgaagcagcagggatataacacaaaaggtgaagccatagatgacccaaaggtgatgagtggaatcagaaagatgtggtacgcaatcgcacggggtgagaaagttcaactccccgatgtagcgtgctatgctagagcgcaaatatgtgaacgttgtaagaataagattagagcgacatggggctatccattagctgtattgctaaccgaggaccaatatttttatccattgctggagcacgtgaagactaatgggtcacgactaaccgcatatggaatggagatgggtaacggaggcatgcagtttatcaacgaaatggttaaagcacaccctggagcaaacatcttaatgggagactggcgtcgattcgacaaaaccattcccccatggctcattcgtgatgcctttaagatcctagaacgtcacatagattttacccacgtacgcactgtagccactaattcaatatggccggtgaaggagcaagcctctcgatctaggtggaaggcgatgattgattatttcataaacacgccaatacaactaagttcgggtgagagattcctaaaagtgggtggagtaccttcaggaactggattcactaacttaattgattcgataatcaatgcaatcgtgatgagatacttaacgtatgaactcaccggtgctttgcctttggatgatatatacctaggagacgactcaataatagttactgataaaccattcaatctggagttgctcgagaaagtagcctttgatcaattcacaatggttttcaactgcgacaaaagctaccaaaccagtctacggaggaacgttttcttcttgggatattttaacgataacggcgaaccgtacaagccaatcgatacaattgtggcttcagccatatatcctgagcgaccagtggaaaacaagttcgaaaccgtaactaggctagtaggccaagcatacgcgtgctttaggccggacgatgcgaagaagttcttcatggcagcaaaaattttgtcagatgaaatcgaaggcttggaaccagatttcgtggaacggtacatcgttgagcatccacaccagttcaagtatctggacactctcggaattaaagtggacaaaggggttaaatttccacaggttcaaccaggtgacgacctctgggttaccacaccacatgcgccgaaacgtcattacaaaccagac

SEQ ID NO: 1734 - DNA, 1452 bp, Soybean thrips partiti-like virus 2
  source 1..1452: mol_type = other DNA
atggtacgtttcattggtagggacaaaggtttctcccagtggcactttgattctacggaatctttctactgcccattagaggctcagcaaaagacgaaaggattagtacgtagtagggtcacactttcatccatcagaagtgacgtcctaagttttggatcccttactagtgctaggcaacctgatgatccactatttcgacaagtggttagggaagctgctaccgtgtggagtttgactgagcaagttcaacccattcacctaaatgatttacctcgttataagttagacactgataccagttcgcctggtttaccatggcggaatattggttatagaactaagaggcaagtcttggacgatagcgaagcctttaagtcaatacgctcattttggcatgtcataaagtatggcaaacgaaagcaacatcctcctgattgtgctgcattccttcgagctcatctagttcaagaaggagagtgcaaggttcgagcagtttggggttaccccgcaacaattggcttccaagaagcatgtttcgcgctcccattaattgagggatttactaatggtaaatttcctattgcatatggatacgagacagctcgtggtggtcatcttcgacttttaagtgaatatggaccgaaaggacatttcttaagttcagattatcgatcatttgataaaactattccatcgtggttgatacgtatagctttcaacatattagctctcagcatcgactttactaagtatcgagactatggcatccctgacgctgatgcgttatttaaagcatggaagtatctagtacattattttatctatacaccaattagactcgcaaatggagagagataccgtaaaagtggcggagtcgccagcggtagttactttactcagctagttgatagtatagttaactggattgttacagtatatgctttaaggaagagtggaaatgtcgtcgagatcattaaggtcttaggcgatgatagtctcgttaggctgcagaagcctcttgacatggagaagttcgagaaatattcatcagagctaggaatgataataaacacagcaaaatcacagaccgcaacgtctcttgagtttattaaatttctaggctattacatatcaaacggtatcccaaagaagccagttgaagagttctgggccgccctgcggtttccagaatatcctgacgccagcttcgatcattatgctacacgtgcaatgggattactaatttcaacatttggacaacacgatgagttttacgatattgttagctcccaactgagtctaggcttcacagtgcgtatgtcaccatctctgcgcagatactgtgctgccctaggaatcgaatccttgccagagaagcctcctcccattatagagttaggtttccctgctttccgtgaccgaaaggtcagatcccgttcgactggataa

SEQ ID NO: 1735 - DNA, 780 bp, Soybean thrips partiti-like virus 3
  source 1..780: mol_type = other DNA
ccacaatatcaaaaacacatcgatacatactgcagaccattaggaactacagatgcaacgttcaaagattttaatcgagaacagcgaccatcgaagccacctacacaagtggaaattgatacaataatacctgtagtcatagatatacttggagctaaaccatttagaccagtacattttacagacacaccaaatgctaaactaccacttagtacaggaacaggataccacaatagatcatcatatacatacaacatacatgcaaagtatgctgcaccacctcgatataagaacaaaccaacatcaaaaggtagattctttccaacagtttttccaatatatagacttattatacataacatgaaatatcacggaacaccactttcgtgcaagcaaaccacaccacttgacgcaagacaacgtgaattagctagatttatcataaatcatccaacaatcatgtttactagaaaccacatctcaaagaaagcaggaccctggaaacagagaccggtctacgcagtagacgattgctttttatacattgaagtcatgcttttcttaccacttatatgccaggcaagaaaactaacatcatgcataatgtacagccttgaaacaattcgaggaggatgtcactatctagattcagtagcgaaaagctatcaatcctattttacaatagattggagttcttttgaccaacgattaccaagagtaataacagatatgtactttcagtactttctaccatccctaatcataataaacaaaggatag

SEQ ID NO: 1736 - DNA, 1419 bp, Soybean thrips partiti-like virus 4
  source 1..1419: mol_type = other DNA
atgcctcttaccagacttccatctggaaaaggattttctcaaagacacaaaacacacagctacccttcaccctatctcattcaattctttaatgagattccaagcaaacatcgtagtccagtaacttttgatttgattaggaaggacttactgcaaaattctaacgatagtaaaattcctaaatcattaacaatgaagcttgcaattcttgaagcaactaaggcatttcaactttcatctccagtaaaaatgatgcacttaaatgatgttttcaagcaagatcttaacatatggacttcttctcctggtttaccatggagagatatgggctacaaaacaaaaggtgatattcgcaaggatgttgacgcagtcaatcgtgtcaggtggttttggcacaaagtaaaaggtggatcaaatattgatgctcctgattgctgtgccttcgtccgatcacatctcgctgattatggcgaaacgaaggttcgtgctgtgtggggttacccagcaacaatgacttttggtgaagcagtgtttgctattccgttacaaagggcctatgaaaaaggaaaatatcctattgcatatggctatgaaactgcagtcggtggtacaaaccgattagttcgtgagtgttctagatttaagtacaaatatgcattagattttaagtcttttgacaaaactgtacctgtagaattaattgatgcagcttttaatattttattattaaatattgattttatgcattatgaggattacggcactgctgatgttctaaagaacttcagaatgttcgaatatatcaaagactattttattaatactcctattcgtttgtgtaacggtgaacgttataggaaaagtagtggtgtggccagcggtagttactttacacaattaattgactcaattgtgaattatattctgatagtgtatttatgcttggaacttaatggaaagctcccagactacataaaagtattgggtgatgactcaatcttttgcactgataaactttttgatcttgatcgtgctgatgaactgttacaaaaattcggcatgagtttgaatcttaagaaaagtgcagtgtcacgtagtctaaacaaactgactttccttggctatcagattaatgacggtattcctagtaaaccgtatgatttatggctatccgctttactctatcccgaagaagctgacagatgttgggatgacgtcgcctctcgttcccttggtttactgtacgcttgcatggggactgatgataggtttgacggatactgtcgagctattctaagcctaaaaccatattctcttgatacatcgaaaggtatctttagaatgcttagaaatgtagggattaaagatgtatccaccactccccctagtaagtggggttttctgaagcgtataatatga

SEQ ID NO: 1737 - DNA, 1338 bp, Soybean thrips partiti-like virus 5
  source 1..1338: mol_type = other DNA
atgcccgcatctggtgcagcgcaccatgctccgttcgcaacggattgggtccgggtatacccccgcccacacaatgtcaccgccaaggttatgacatatttccgccagtatgccaaacggcttaccggtgagcggtatgcgcgtgccttgcgtaaggcaggtgaggactacagagccccacccattaggccctaccatatcgacgacgtcatatcacacttccagcatccacatacatcaccaggtctaccgtggactactctgggatttcgacgcaaagatgaagtgcccctatcaagcgttaaagctgctattcgcatgtacaggcagggtatatggaataagtgcacttcgccatgtaacgcggtttgccgatcaatggtggcaaagacgccgaaacaccggcttatctgggtttatcctatgcacatggtgttagcagaaggtatgtttgctcagcctcttatcagttaccacacccacaagcgtggtacatatggacagtggatccagttttccaagggacatctgcgatcattgatgtcacggaaacctaggaagatgcaatggttgggtattgactactcagcatacgattcaactgttcctccatggctcatcagggatgctttctccatcctagaagcaagcatagacttcaactcctatgcaggatacggacaccccaagaaaccagatgaattgcgtcgactatggagagttattgtcaactacttcataaacacacctgtcaagttacccagtggtgttgttttgcggaagtccggtggcgttccaagtggttcatatttcacctcgttggtcaactccgtgtgtaatagcatcatcaagcattatatactggatgaggttgaatactcgagggacgccaactgggaattaggcgatgactgcctagttgctgtcgccgatacgtttacaatggagggccttgacaccgttgcgaacaaagcgtttggtgttaatgtaaacgaggacaagagtgaatgcggccagtacgtcagctttctcggttatcggatgagtcctagcggaatcccgatggcgaactatcagaagttgatggcgcaactctgtctgcctgaacgccctgataagtgtctcgaagaaacagtctcccgggtccgagcgctacagttatcatgctttggccgcggctgtttaccgttcgtttttgagacccaagcctggctggagtcacaagggatgtcagactatacaccacgcctacataaaaggtctgagctgtatatcaagctatcagcactcgacctagcatcatttccccctctgaccaaggtcatgatgatggtgtag

SEQ ID NO: 1738 - DNA, 1306 bp, Soybean thrips partiti-like virus 6
  source 1..1306: mol_type = other DNA
gacttgcagtagcaagtttcgcgtgcaataccgcgtcaatagtagaattaatgatgtgtttatcaatcttactacagatcctagactgtgcagtccaacagagcagcgttgtttgcggagaaacaccacccgctatgttaggctgatgaaagctaggcatattgatccttttagcgaagattcttttgacttatcttggtacgaatcctcttttcacaagaccataggatggcttaagaacaaactttgcttaagggttgatgccttgccagtatatcatccgaacgacgttgctgactacctgttggaccgtcagcgtaacaatgacttatcgtcatctcccggtcgctactttaaacgacttgggtttaagtcaaaacgtgaggtctacgaatcaaagaaaggcatgttttatgtcaagagctttatccataaggtaaagcgcaaaaatgtgaagtttgcccctgcttgggttgcttgtcctagtgcgattatccgtgatggaaagattaagtacaggaattgcatcgtgtttccagccgatgtatccttacttgaaggcatgtttgccgttccatttctgtccagattaccgcccacttggataaatagagctgaaagagactgcaaaagactctgccgtcttggttcctttaaagtcgatttttccaggcaagatacaactgttccaaaacagatggtctttgctggtatgcaagtgataaagcacttgctcgacttctcacgatacgagaaccgtggctccccaaacagaaagttttcacttgaagactgctttgatcgtttagtcaactatcatgtaaagaccccgtgttacgttcacaatgggaagatcactttcatccaagatggaaataaatctggttccatgtttaccaatttattgtcatctgtcatttcttatttgtcatgtatgtactcattcgctccatacgatcttgattgttatggcgatgatacatttcttgttcaaccaactcacaataagaaaatgacttggatggatttgaaatttgaacaacctaacgaagcaggacaccttacttatcaaaagtgtgtttgtgtcggtggccgtggctattatcctggtgtttggttcagaaatatcatgaacaaagcgctatggtatcatagaccatctatcgcttggtgcttattgcattcagtgcgatggcttactccggaacaggaaacttacctaaaatcatttttaggtagagatataatgtacggaagtaaatggcttaccagataccttttacgaatagtagaatttattctatag

SEQ ID NO: 1739 - DNA, 1326 bp, Soybean thrips partiti-like virus 7
  source 1..1326: mol_type = other DNA
atgatgcggagcatcaaacacccttttgtcacctcttggattaggtataatcccagaccactcgatgtggctgctaaggttgatgcctatttcaggaagtacccgtctaagccaaacgatgacaggtacttgcgggcactacatcttgctcgcgtggactattctggtcccaaagtttatccctttcacatcaacgactcaattgccaactttcaacatacgaatacatcccctgggtgtccgtaccgccaaactggttaccgtcgtaaagacgaggtcccggcaatcatgatcaagaatgccgtgcgtcgctataaagagggcgagtggaccaaatgcatacatccgtgtatcgcggtgtgcaaatcaatggtcgctaaagtcccgaagtgtagacttgtttgggtctatcctgctgatatgacatttgccgagggaatgttcgctcaacccctgattcatcaactcatgggagaacgttcgcattatgctcagtgggtccagtattcaaaaggtcatatgagttacttgcaaggtcaacttcccaattcatggaagtggctgggcttggactattcatcgtatgattctactgttcccccatggctaatcagagatgcgtttgacatcttgtgtgagcgtatcgatttcactcgatatcatgggaatggcataccagaacccaacaatttacgtcggttatggcgagtaattatcaaatactttattgagaccccaataaagttacccagcgggaaagttgttgtaaagaaaggcggtgtcccgagtggttcatactttaccagtctggtcaactcagtgtgtaattgcattatcatgcattatctgttggacggtaaagcctactcgaggtcagcctcatggcaattaggagacgacatgctcgtagccgttggtgaagccattcatatggaagggatagcaaaggtggcattaaaggtatttggagtcatagtgaatgcagacaaaagcgagtatggatcatacgtcagctttcttggctatcggatgtcccctaaggggaaacccgtcgcaaactacgagaagctcgttgctcagctttgccttcctgaccgacctgattatacaatcggtgactttgtagcccgggcgcgcgctctgcagctttcatgttttggccacggcagctggcagtttgtgtgcgaaactgaggcattcatcgtttcggttggagctcaggattggattccaaaactgcgaaaacgctctgagttacgatcaaaacttgaagcgttagacctagcacattatcctcccttgaccagagtgatgatgcaggtctaa

SEQ ID NO: 1740 - DNA, 2094 bp, Soybean thrips partiti-like virus 8
  source 1..2094: mol_type = other DNA
atggctcttaacccagttagaaattatctacacgagcaaagaattagacaaaagttcgaattaaggttgcattcaatttatgaaagtaaagatgaagaattacccgactttgatgaacttgaaaatgtcagaatgatttactcaagtggacgagatcgaccaaaagaaaagagtttacaatcaattttacaaggattacatgacaaaatgataaatacactaaaagatagagatacaaatagaggtgaagcttttgaattctacagacagatccactacacattaccagaagagtggcaaccatcagaaggaattctaacattaccaatagtctaccacagaagcagagtaatagaaactactgacatagttggagagacaggatatgatctacacccgtttattaaatatttaattagacacaagtatccacatttagaacatattgtcaaagcatattgcagaccactaggtacaactaaagctaccttcgatgatttcaataaagcacaataccccgtagaaccaatttcagaacacagacaagaaagagtaattaaacacgtaatgagatgtctagacgttagaccaactctacccctacattatgttgatacttttcatattggactacccctaaatacaggtactggatatcacaatagacattcatacttaacccaaatccatgcaaaatacttctcacacccaaaagaatacgcatataaacccacatcacgtggatattatataaacgcattctctgaaaaagcaaggtatttaatacacttaattaaatacaatggttttccaggcaattatgagaatacttacactcaagagcaaattgacgaaattttagacaaattttatgcgagataccccacaatgttatttacgcgaagtcacatatcaaaattattagataaactaaaacaacgacctgtttacgcagttgacgaccttttcattagaatcgaagccatgctaacatttccctttcatgtacaagcacgaaatatgaaatgttcaattatgtatggacttgaaacattcagaggaggatgtgcatacttagacaagattgcacaacaatataagtcgtacttttcattagattggtcaagttttgatcaactcatgccatgggcaattgttgatacgtttttcaataaatttctaccaaaattaattatagtaaacaaaggatatcaaccaacctttgaataccctaacacatcatatagtcaaacagacgctatggcagggaagacacataacctattagcattcttaagagaatggttttacggaatggttttcatgtcagcgacaggctacgcatataagcggacatgtgcaggaataccatcaggactgcttaacacacaataccttgatagctactgtaatttatttataatgatagatgcattaatagaattcggatgtacagatgccgagataacacagattagactgtttgttatgggcgatgataacgtaggtttcacaaattggagccttccaagattagagtcattcgtagacttcctagaagactatgcactaaaaagatatcatatgatactcagtagaaagaaaagtatagtaacagaacaaagacaagagatccaagttttatcatacacactcaacttcggtttaccaaaacgaagcagcgataaattaatagcacagttgtgctatcctgaacgaggagtagttgataaatggatgtcatacagagcaattggcatagcatatgcctcatgcggatatgatttacaagtctataagtttgcaaaagatgttttcttaatgttcctaccttacgctaaaatactatcaccagaagaagatgagcttctagctccatatttacctggacaatttagaatacttaatgaagtccctgattatttaaagaaattagaatttccaacaatagcagatattcagaaagaatgccttaactggcaaggtcctttacctacccacccaaaatgtaatgaaggacattttctatataaagcagatcacgaatacagtgactatatcacattagaaaaatggtataaaaatcaaaaataa

SEQ ID NO: 1741 - DNA, 1584 bp, Soybean thrips partiti-like virus 9
  source 1..1584: mol_type = other DNA
atggcgcacaccaacgttaccaagttgtctaagggacaggggttccctatgctattaaaagcagctagacccgattcaatcgctagagaagcgtgtaataaatattttggtgaagataaagttactcagataacaaattgtcttcataggagtgcacttaattatgaagcaattgttgaagacctaatgaaatacgaacgtaaacatgttcgtcgtatgactggcgacgcttgtgccatatatgaaatggttttacagagtgttcgtcaagatttgaagaaggaggataagattataccacttacttttgatgaagttggtaaattgccagactttcctggagctaagagccctggattaccacataaattgatgaactttcgtactaagcgagaggtatttgaggatgaagaacagatggccatattaaaagatatgtggtatgcagtagagaataagaaagtggtacattttccagatgtttgtctgtttgcaagggcacaaattgctaaggttccaaagcagaagattcgtgctacgtgggggtatcctttctttgtgtatatggaagaagctagattcttctacccgttgcaggactacattaagtcacagaagcacaacttccccattgcgtatgggtttgagatggctaatggtggaatgagtgctattaatgatatgttgttagagactaagtcctcacaatatatagtttcagattggcaatcgtttgataaaactataccgccatggttaattcgtgatgctttcgctattttagctgaattaattgatttctcgtctgtaggtcgggaaagtcataaccgtcgtagatggaaagcgatggttgattattttgttgaaacgccaattaggacgtgtaaaggtgaaagatttcttgtcactggtggcgttccttctggttcatgttttactaacattattgattcgattattaatgttatcgtgaccagatttttggtgtaccagactactggtaaatttcccactggggaaatatttttaggtgacgatggcgtttttaccctggatgggtttgcaaatttggaagattgggcaagcttagccttgcagtatttcggaatggtactgaatgtatcgaaatcatacgtcacgtcccgtcttgataatgtccattttttgggttattttaatattaatgggcagccctttaagaatcaagactttttgatagcgtcttttatatttccggagcatcgtcgtgaaactaaggtggatgcgtgcgcagctgcattgggccagatgtattctggttttgatcctttgtatgccgtacgttggttgaagataataaggttcatcgcagacagtgaaggtggacatagtaatgaagatatcttgttgaagcttagacatcaagcttataggcataagtatttacaacaggttggaattgatactgccactatgactattcctcatgatagtggctttgtcatggaagttctacccaagatgtcgtgtgtacatagattacgtgtaagaaattacgatccagatgagttagctgctttagcggatcttagattaagaagttga

SEQ ID NO: 1742 - DNA, 1851 bp, Spinach cryptic virus 1; identical to SEQ ID NO: 622
  source 1..1851: mol_type = other DNA

SEQ ID NO: 1743 - DNA, 2142 bp, Steinernema ceratophorum partiti-like virus 1
  source 1..2142: mol_type = other DNA
atgttaccactacgtgactttcacttcgaacgcgagttaagatcaaaccttgaaatgagattatatcaaatttacaaaggtgacaaagaagccctaactttggcccacaaccacatatcgataagagcattatattctagttttaaaactgaacgatgtttagatattacaaccaaagcccgacaatcaatttatgagcgaacgcgaaatcaaatttctgatgaagtttcaacctcaaacgaacgatttcaattttatcgttacaatccaagactagttcccccacccaatagagaacctgcccccggaattacattcataaagtcgaactttcacactggccgaacaaccaccgcatctgaccaactaccagaatcaggttaccactgtcctagacggatcagcaacctaatgacctggaaatatccgcaatacttgtctatcattagacaatacgtcagaccaatcggtaccacagacgcaactttcgccgattacaaccgtgagcaagtttactgtcctagaaacgatgcagcactcaatgaccgtatagttaaactaatatctgaatacttagatatcaaaccataccgtccgctacattttattgacactttccgcgatgatagaccactatccactggaactgcctaccataatagatattcatatacgattaaagcgcacgcaaaattttgccacccagcaatttatgcctacaagcctacttcaaaaggctactacactaacgcttattcacagtacgctagacgagttatccacaatattaaatatactggactaccattttctgaaaaagaaacagcgcaactaaagacagtcgatcacactataagtcatttgaaccgattcatgaacagtcatccgactcgtttatatactagaaaccacatatcaccagttaaaggcccttggaaacaacgacctgtatacgctgtagatgataaatttctaacaattgaatcaatgctggccttcccagctctagttcaatcccgtaaaccaacctgtgctataatgcatggactggaaacattacgtggaggcaatgtccgattagaagaaatagcatgcaaaggtgattacgaatcattctttacactagactggtctcaatttgaccaacgcttaccacacgctataactgataccttcttcgaagattatctaccttcattaattatcgtgaaccatgcctaccaaccgacttatgaataccccgcttatcccgaactaagcactgaaagcaccgcaactaagatcaagaacctactagattttctacaatactggttcaacaacatggtctatgttacatctgatggatacggctacaaacgccaattcgcaggagttccttctggaatgttcctcacccaattcatcgattcatacggtaatctatatctaattatagatgcactaatcgcttttggatgctccgatgatgaaatcagaaccattcgcctatttataatgggagatgataattctggattcacacactggccgattacgaaactagctcaattcgttgactttttcgaatcctatgccctaaaacgatggaatatgaaactatccgcttcaaaatcaaagatatctatcttacgaactgaaattgaaacgctatcatatcgaaaccaatttggtttaccccgtcgccctattgataagctacttgctcaactttgctacccagagtatggaccgaaaccggaatacatgtcagctagagccattggaattgcttacgcagcctgtggacaagacgacacctttcattccttttgtagagatgtttacaatctttacttagacgaaagtgttgacgttactgacccaacaaaaagatcgaatattattcgacatcttcctggaatcttccgcgccttccctgaacagagcgagatacttgaatttacgcgatttcctgaaatcagcgaaattcagcaattagtctcctactaccatggtgaactggacgtcactccgaagtggaacctctcccactttaccgacagaccagacatccccctggaaaacgcgagaaccttgaaagattttgaatccgaaaacggaccaattctgactagacttaacgaacttaagaaaagttga

SEQ ID NO: 1744 - DNA, 1761 bp, String-of-pearls partitivirus
  source 1..1761: mol_type = other DNA
atgcagaacactgtcgtaattggttataagccaaaactcgctaaagcacttcatggaaatcctgatccaggatcaaatccagcttatcgagatacagttgatcacgcacttagaaggtttcttacagcagaagaattcgatatcgttactaaaggttatcgccgttccccatggaatgatgaagctcttaaggaagacatcgcaaagctcgattcaatagaacatcctgttattaaggataaacactattatagagcattatctcatgcttatagattattctctcccaagaataaaatgaaacctgttcattttgccgatctacgccattatccatggcaattatcatcaaatattggagccccatttgctaccagcaaagaatggcaaaaatatgtgaatgagaagtttgatttaggaggtcaaagccctaaagtacgcgacctatttaaggaagcacatcatcaagccctctatccctcgatgattgatagacgaatgactaaacgtaatctctacaacgaaatgtttctcattaatcgaaagaacatccatctaatcaaagatggacgtaaaactacggacagcggacacgatctccgttactggaatacagcttttgctcgacaacatcttgtcgaagaagacgatccagacaaagttcgtttagttttcggtgcaccctctaccctgcttatggcagagttaatgttcatttggcccttacaagttagcttgctagctcgtggtcctgaatctccaatgctttggggatatgaaaccttaactggtggctggtcccgtctttacacttgggccaacaaggtccaacccagatacgggtccgtcgtgaccctagattggagtcgtttcgacaaagatgcgaggcacaccgttatccgcgatattcatcgtatggtaatgcgccccatgtttgattttaataatggttatcacccaaccatctactaccctgaaacacccgatactaacccccacagactagaaaatttatggaattggatgactgatgcagtcctcacaaccccactaatgctacctgatggcactatcttacaattcacccattctggcatttattctggattcttccagactcaaattctagattcaatttataactgtgtgatgatattcaccatcttatcaaggatgggatttgatatcgaaaagatatctattaaagtacaaggagatgattcaatcttccttatgccttatagttacatcaccattaaggatacattccttaactttttctctcaatatgctaatgtttattttggttcaacagtcaacataaagaaaagcgaagttcgagaaacactcgaaggagcagaagttttacgctaccgcaatcatggcacaatgcctgaacgcgatgagctacagttgcttgctatgctcagacaccctgaacgcacagcatcattagagtcattaatggctcgaacaattggcgttgcttatgctaattgtggaaattacactcgtgtttataacatttgcgaggatatttataatttcctggcgaaaggaggcttcaaacccgatcctttcggactaccaggtggattacgctacaaacagaattacatcccgagctatgtggaaattgatctaacaaggtttccaacatatttcgatactgttcgcagtctacaagatccgcaacgtgagattttaacacaacatcactggccggaacttcactttatcggtatccccggaaagtcttag

SEQ ID NO: 1745 - DNA, 1638 bp, Talaromyces marneffei partitivirus-1
  source 1..1638: mol_type = other DNA
atgtcggaagccagagttccagaaatctcgccttctgatcccccatcggttgatgaaatcatagaggagtcccattcggttgacgattccactctcgttccgtccctacggacgagaggagccagctatgacgtaatcccacaaaatttcagttctcctggtctgagagagattgccaggtacggtggctacagcgtttattccgctcgaagcaataccgacgcctgggttcggaccactttaaaagaattcgatcgacaagtgtacgacgatatttatggatacacccgaaaaccggaagggccggttggtatgtataaatctctgttaaaattctcagagggtcggaattcctttcatcatctcacgcgtgtacaacgtcgtgcgatgcaacaagcaatcatgcgtgcgaggaaagcattcaagctaccttacaaacgtgaacctctagactggcacaaagtcggtcagtacctccgccgtgacacggcggcaggtgtgtcgttcatgggacaacgtaagggtgaagtactcgaagaaatctaccatgaggctcgatacctcgggcatcgtatgaaaggaaggaagggtcgtcgttttaacccaaaggaagtaaggttccctccttgcttagctggtcagaggggtggcatgtcggaggccactgacccgaagacccggctggtttgggtgtaccccgcagagatgttggtggttgaggggcaatacgctccccggatgtaccatgatttcatggcgcaaccggataccccaatgttgaacgggcgttcagcgcagaaactttacactgagtggtgcactggactaagggaaggcgaaacattgtacggacttgacttttcctccttcgatacgaaggtgccagcgtggttgatccatgttgcctttgatatattgaagcagaacgtcgacttcgagacgtggggtggtaaacccgtcagcaaagctgatcgtcagaagtggagtaacgtgtggaatgggatggtgtggtacttcatcaatacgccgatacttatgcctgacggacgtatgttccgtaagtatcgtggcgtgccctcaggatcgtggtggacccagatggtcgatagtgttgtgaattacatactagtcgactatcttgcgacgtgccaggaggtagacgctcgtggtctcgttgttttaggtgacgattcggcgtttcactcgacgcctgactttgacttgatcaaagcgagtgaggatgcagaagctgtctcgatggtgttacatcccgagaagtgtgataggactgatgatcctggtaagtttaagctgcttggtacaacctaccgcaacagccgacctcatcgtgatacgaatgagtggtttaaacttgcactgtatcctgaatccagcgtttcatcactgccggtgtcattaagtagactcattggattgtggattggtggggcaatgttcgatgataagttctgtcgattcatggagtactttcaaacatgtttcgagtgtccttcggaaggctggtttaagaaggatcaacgtcgatggctcgaggtggtctacggcggtaaagcccctcgtgggtgggccaacaataaatctctgttttggagatcaatcttctacgcttatggctag

SEQ ID NO: 1746 - DNA, 2166 bp, Terfezia claveryi partitivirus 1
  source 1..2166: mol_type = other DNA
atgaactttaccgtcatctacgcttcgatacttcactacatcaacatggtgatatttgctcaacgctatctcgaacccgacgaaacaaagtctcgctatacttacgtaacagaacgaaccatccctcacaaccgagaaccctctcctggccttaacttacttgaacatctcgaatatcaaccattcggagactttcaatataaagatcaagatcctgctggtccacctccactctctggaattgcccgtatcattagacagaactttccccagttcgcacccgctctatctgaatactgccgtcccacatcaagtcccgactccgcattctctgatttcaacaagccacagtcccccatccctgcactagactcaacagtcacagaaatagtactagaacttctagatcacttttttgacatgcaaccgtataacactatacattgggctgacactcgatttgctgatcttcctttgtctacagctgccgattattatcacagaacttcaacgttccgaacagctcatgccgctacctcacaccccatttggtctgcaggtccaacaaagaaatcatggtatatcaatgtccatctagaaaaagatagaaccgttgctcacaatttcaaaacttttcgctatccattcaacccgaacactagcaaatttgataagcaatccggcattcaatcattttacttttcacatccgacaatgattcacactcgctctcatctctcaaaacgaaccggtcccttcaaagtccgacccgtttataacgtacctatgctctacctccgcatggaaactatgttattctaccctatcctttgtcatctcctaaaaggtacatcctgtatgctttatggctatgaaacaattcgtggtggtttacatcgtattaaccagattgcctactcctttaactcttacttaatgttcgattggtcctcatttgatcaaaccgttccttttccagttatcgcaatcttcttcctgcaatttattccgaaatacattctcgtaaatacattttacgctgatatttctaattacccgtactctaagaatttcgactcgttttttcatcgagctcaagcactccaacaaaaaggtttatttcaagacatcccaactgatgaacttgcataccttcttttcgcccaacagatatataatctacttatatcactctggacatggtaccaaaatatggtattattaaatggtgatggattcgcttacttaagatcctgtgctggaatcctttctggattcttactcacacagtttctagatagtttctgtaacttatttgttatgatctattcaatgctcaactttggttttacacctgatgaaattaaacagatgcgatttttcattcttggcgatgataatgttatatttacattagaatcactaaatagaatgctttctttctttctctggatcccagattacgcagaaaagacattccatatgaaaattagtatcaagaagtcactcattacatcgatccgttccaaaatcgaagtcttatcctatcgctccgccgaaggactacctcgccgtgacgttatgaaattagtaggtcaattcgcttatcccgaaagacatactgatgaattcatcaacattcaccgttgtataggttttgcctatgctaactgcgcccaagatctcgctttccacgaactatgtcgtcaatgtttcctgtattaccgaacaaaagctattcaacttcgaatagataatccagtccgttatgaaaaacatacccgctctattatccgtaacatctacgtccaaatgctcgctacaaagtcaacaatccacaccaagtctatccttaagaatgaagccctccccggtccaattcaggcactactttcgcttgacgcccctatccctaatttagaacactttccttccttcactgaagtccaaacctacgtatcccgttggcatggtccactttcaactgacactaaatggaatcgaaaatatttcttaaaccctccaacccgcactaaatctacgaaaaatgtcaccctctttgacgtacttcaaaagtacccacatcaatttgaatccaacacattcctttcccatcctttaatgcactctgaatctacgattcgtccaaaagatgaacccctctag

SEQ ID NO: 1747 - DNA, 1452 bp, Thedrake partiti-like virus
  source 1..1452: mol_type = other DNA
atgacgatgttacaacgtcgaccatttcgtgcagagtatctggtgcagtggaatgcccgaaagagtaacgatgaaaccgaaccattaatagataaggtagtcgttgctgttctccaccaacagggtatccctttcgagtattcaggtgattatcgtaatatttatagttacgataaactgatggagcagctcgaacactatgaccgaaagtttactctgaataaggataatccttatcttaagttcggtctttcagtagcctttaagttatttgcttgtccagacacaaagatgagactcgaaacagttgagcttgtaagtggagctacggagctaattgaaactcttaacattaaagaggatcgatcggctggcttaactgcctacggtgagtcaaaagcgacggcgtttacagtggggttggataaggcgattgacattctacagaatggcaaatctccagctccttgtttagctggtgttcgtactcaacgtggggagaaaaccaggctcgtgtggggctaccctctggagatgacaataattgagtctgtggttgcaagaccattaatcaattacttcagggaagctgacacagtcatgtcatttggaatgtatagtcacgagacgggtgcgaggatgcgtacttccgctagccaaaccaagtatcactattctctagactacagccagtttgacgcgcatattggaccacagtttattcagtatgcatttgatgcattcagaacgtggttcaatctagacgacaaagtctgcggtgatgtaacactcagggaactttttgatcaaattcaaaagtactttgcgacgacacccattgttatgccaaaacgtggggcgaagtatcctgaagttgttgtgggtaaacgcggaggcgtgccgagcggaagctactttacccaactggttgattcctttgtcaacacagcactcatattcgcttgctcagccaggtttcaacttggattgcgagatgagaatgttttcgtgttgggagatgattgcctgtttttctgcaacaaggatgggtcacctgaattgttgagcaagatgagtcaattcttatgtactctaggttttaaggtcaatgccgagaagggctcttgtggtctttcgaccgatgagatcgagtacctagggcgtcgttggaagaatggttttccagttcgttcaatgaaagaagttacccgtgggtccttgtatcccgaaaattaccgaaagtacagtccagaaagaggtatccgccaaaagcaggtactctcagttctaaactcctatctattaacctcgtatttagaggatccccctgtaggagtggatgtgtttcagcaggtttatgaaatcacaccctggatgtcgtcagggtttacggagtttttacttcgtgagggattaatacctggtgatagcttaaggcgcgccatctattga

SEQ ID NO: 1748 - DNA, 1602 bp, Thelebolus microsporus partitivirus 1
  source 1..1602: mol_type = other DNA
atgcgagatgtaacttttgacaccctcctctccccggatgacgaactcctcacaggaaacgagtttttagcagactcaaatcttgttcgtcgtccggagcgtaaagaggaactcctttcgctacccggtcttaaagagattgcgttgtatggcggttactccgtctacagcccgcccggaaacacggacccttacgttcgtgaaactctgaagctattcgatcgccagatgtacgaagacatctggggcttcactcgccgtcccagcggcttggagggcatgtacactgctctccataaatttggagaatccaaagtccagtttaatgatatgtctacatatcaacggtctgtgatgaaacttgctattggtaaagccaggcaagcgttcgcattacctgtcaaacacgagccacttgaatggcacgaagttggacagcatatgaaacacgacacgtcagctggagtcaccttcccaggtaagaaaaagggcgatgttctgccccagatctacactgaaggaaggtggcttggtcaccgcatgaaagagggcggaaaaggtcgttttgatccaaccaaggtgcggtttcccccttgtctagctacccaaagaggttcgttgtccgatagggacgcacctaaaacacggctagcctggatctatcctgctgagatgttaatggttgagggcctaacggcccccgtgatgtaccgacagtatatgtcgttgcctgatggacccatgttagtaggaaaaagttcacagcggttgtattccgagtgggcttctaagtgtaaagagggtgagaagttgtatggatgcgatttttctgcttttgatacccgagtgccaacttggatgataaaggtcgcatttgacatccttcataacaacgttgactggttgaactggcgaggaaagcctacaaccaagagagccagacagaaatggcgcaacgtatgggatggaatggtttggtacttcataaacaccccgatcctcatgcctgacggacgtatgttccgcaagcttcgaggtgtaccatcgggatcttggtttactcagttagtagatagtgttgtcaactacattatgattgagtacctagctgggtgccagcaggtccaagttcgaaatttgaaagtcctaggcgacgacagcgcgtttaggtcaggtcacgagttttgtcttcttcgcgcagcggaggacgctttgtctgtcggaatggttctcaactccgataagtccgaaagaacggagtgccctactgagttcaaactcttaggtacaacgtatcggaatgggcatgcccatcgtcctactgaagaatggttcaaactagctttgtatcctgaaaatccagttcatgacataggtgtatccttgtcacgtttagtcggactctggctgggaggagcgatgtgggacagccacttctcccggttcatgcagtactttcagtcctgctatcagtgccccgacagcggttggttctcgaaagatcaacgacgctggttagagatagtgcactctggaaaagcaccccgaggatggacagcgaagaagtccctcttctggagatcaatcttttacacactgtga

SEQ ID NO: 1749 - DNA, 698 bp, Thin paspalum cryptic virus
  source 1..698: mol_type = other DNA
acatttgaaagacgtacaatcgagctatccatacaaatggaatgtcaacgctgaacctccattctcaactgacgaattctttctcagtcagaggaaaacctttggtgaattcattcaacaacacgagtatgaacacatagataaatacgactttttccgtcgtcatcccaacactgaatcacatgaccttatccgcaccgtcgtcccaccgaagtttggctatatgaagtcaacgatcttttcatggacacaccgctggcaccacgtcatcaaatcagatttccgagatagtactggtctccacaccactggatacttttacaacagatttatcttccccatgctactacatacaaagactgcaatcgtcaaaaaggacgatccgaacaaaatgcgcaccatatggggcgcttccaaaccttggatcatagctgaaactatgatttactgggaatacattgcttggatcaagctcaatcccggcgtaacccccatgctctggggttttgaaaccttcactggcggatggatccgtttaaaccacgtacttttctgtggcttactcaaacgatcctaccttacactggactggtcacgctttgacaaacgggcttacttcccgcttctctaccgcatcatgcaagctacccgatccttctttaattttaatgaagggtatgttccaacacacccttccc

SEQ ID NO: 1750 - DNA, 1467 bp, Tomato associated partiti-like virus 1
  source 1..1467: mol_type = other DNA
atggaattatataatggacatgtatcttacaatggaacttttgaatataaaggtaaacttactggttttggcatgcgcccaactggtgataccttatctccatacgctgtgatttgctttggtgaacaggatggtttacatcaaagatctagacttagttctagactaatatttcacgatgttaaggaaatgggcaaaaataagacacctatagattttactcaagaagcttttgcttatgctcgttggaagacgtttaatgctttccaatttcctcatcgtattaatcctatccatttaaatgatatatttgatatggatttaccatgccgcaaatccagcccaggaatcccttggcaaccatattttaaaacacgtggtcaagtcatggattgctacgcagctagaaactctattcgatggttatggcatagagtcaagaagggtgaagatgtttgtatgcctgacaccaaggtattatatagatcccacatctctgaagctggcaagcctaagattcgagctgtttatgggtacccaacaactgttaccctggctgaagctcaatttgctgttccactcattgctcagtttaaaaagcttgaattaccatactgctataagtacagtatgggtcttggtggtgctaataaattgcgtactgatatcaaacgctataaatttttcacttgtcttgattttaaaggttttgataagtgtgccaccaatgagcttattgaaatggcttttgatgttttgctccaaaatctcgatttttcgaggtaccatgcttcaggagttccagattcaactcgtttattccgtgagtggcggaagattattgagtattttaagagaactccccttcgattctttaatggccatagagttcaaaaagatgggggtatacctagtggatcttatttcacacaaatgattggctccattatcaattactttattataactttcatgtattacagacagttaggcagaggtcccgatttcttaacagtttttggtgatgactcagttgctgctgatgatgaaaagatctgttttggtaaggctattcacgatgtttatacgtatcttggttacgtatttaatatcgataaatctaaatttactgatcgtgttgatgacgttgagtatttaggttttggtatttcaggtggttttcccagaagaccatttaagaagtggcttgaaagtttatattatccagagcatcccgatatgtcctgggatgactttgctagtcgtgctcttggtttattgtatgcgaatagtggagttgatcagaccttcgatttgatgtgtaggacggtattatatcataaaccgtttcgtattaaactcactagagattttcaacgatttcttgagaatattggtgtcactatcgaaggtatgcaggttacccccccttcagcaatggatctactttttagtttgctgaagtaa

SEQ ID NO: 1751 - DNA, 1845 bp, Trichoderma atroviride partitivirus 1
  source 1..1845: mol_type = other DNA
atgaagaccaacttactgttcctctacgcactacccgagtctcaactcgcgaaagtgaacaaatggaagattgcctctgaagcgatgacagcccgaaatgaatggcttgagcgacaaatgcgcaaattctatactgaggatgaggttaaacaggttttaacaaaccgtcgatcagcggacagtgatactgccctaatcgaagatttcatgcgatgtgaatttccggaacatattattccagaagaccacaactttactaaagcaattgaaatcgttactgaacattttagaccggagcgaaagctgcaccccgtgcattttcccgacttaagatactaccccgcggagctatctgtatcagcagaacgcccctttactgatcctagtttcagattcaaacctatgaatcgagatattgattgggaaactggagtacctaaagttactaaagttgatcaccacgatgaacttcagaattgggataaacataccgatgtcttaacttacttgaaatggaaacaatccaaaggattaatcgatgacgagaaaagttcatatcataacctatacaacgagatcttcacatataacagaccactcattcaccaaattaaagaaggagatgagccattttggaaggatggaacacccataccttatcaggctttgacacttcacatgcgatcacatgtcgtcgcagcggatgaaccagacaagataagagctgtctttggtgcaccgaaactgctacttcatgccgaactgcatttcatttggccgcttcaagcgagctatttaaatggaaaatgcggacgcatgctttggggaagagaaatgaatcgcgctggatggcggaagctttttcaggaaattcatcaaaatggcaagcctaacactatcgttggcgtagactggagtcaattcgacaaacgtctcttacacgcactaattcgatgggttcacaagatatggcggacttattttgatttttccaaatacgaagaaacttctacttatccgaatgcaacaccaggcaactcagatcgtttagaacgactgtggcaatggatgtgcaatgcgatcaccaatacaccaattattttaccaaacggtcaagtttggaaatggaattggaatggatttggatctggatttcaacagacacaattaatggatacttttgctaatgcaattatgatttacacctgccttttggcacttggcgttaatctattggcaaaggaattctgggcacgctttcaaggcgatgattcgatcatgtcgtttttcgaacgcatgtttcaaatctacggccctggatttttagttatgttagaaaagagcgcagagttctattttaacgctaaaatgaatgtcaagaaatcaaaaattcaagaacacgcatctcagatgttcgtactcggctatttcaacagcaatggattagcataccgtacggatgaagatttattgcgacacttgatgttccctgaacgaccacaagactttggaagacttgcggcatcggctgtaggactagcctctgctagcctcggctgtagcccacgtttttacatgttttgccggtacatatggaacaaacttgtccatcaaaagatggtcaaacccaaatggaaagctttgaaatggatgattcgagctagaatgtatgaaaacatagaccagttgaaagcaatggactttccaccctatgatgaattactttcgagacgcttcgccatgacgaacagaacagaaagcgaaaagcaacgacaatggccaacaacgccaaagtcatcaacttctgctttttacttcttgaatgatgttacaacatcagtttga

SEQ ID NO: 1752 - DNA, 2184 bp, Trichoderma citrinoviride partitivirus 1
  source 1..2184: mol_type = other DNA
atgcgtttccccgacttccgagacattctgtctgaagcccgctcccgtattcaaaagttcaaccaatggtatcataataccaacgacgccgaacaacattcgacgatttcgcctcttcctctcggtcaacatgaccatctcgaacccgacgcccaaaagctccgtacatattttgaacgtctccgctttacacacctaggcaaccaacccgaacccacagccgaagaactccataatctcgatcaaacgtatcaacactacgtccaacgtcatgaaaattggaacgaaccctttgaactctaccgctcacttcaagactccgaactcccgccaaaccgctaccccagccctggcctcaccgttctgcctctccggtaccactctggtatcattgtcgagcccacccacgaagttcccgtcactggcttcgaaccacatccgcttatccaatatcttgtcgatcgcaagtatcaagagtacaaaacgtaccttaggtcctactgccgcccgctagacacgactcaagccacattcgaagattttaacaaagaacagattcccgtcctccccctcacggaagaacaaattgcccgaactctgcctcttgtgacccacttcctcaacgcccagccttacctgccgctccacttcgtcgacacccgtcgcatgaaaactccgctctccaccggaaccggctatttccagcgcttttcttatacgtttctgacacacgccgcttacgcccactcaaaactgtatcaacgccgccccacctccaaaggctacttctttaacacgatctaccaatatggccgaacatggcttcactacatcaagcgattctcaaatccttttcatgtaaatattaacacagatccttccggttactactcctccctcaaacgcttctttcaagagcacgcgactatgctattcacacggatacacatctccgaccgcgatggcaacttaaaagtccgccccgtctatgccgtagatgatttcttcatcttactcgaaggcatgtgcacctttccactgcatgcaatggcccgtattccaatcaatggaatcaaatcgtcaatcatgtattcctacgaaactattcgtggtggttgtgcccaactagactggatcgctcaaagcttttcgtccttcctatgcattgactggtcatcttatgatcaacgtctacctcgctgcataaccgatctcttctggactcgattcctccgctcgcttatcgtcatttctcatggctaccaaccgacattcgaatatccaacctatcccgatctcgacgaacacgctctctacacatattttgataacattctacatttcctacatacatggtataacaacatggtgtttgtaactgctgatggcttctcatacattcgcaactactgcggtgttccctcaggcttactaaacacacaatacctcgattcattcggaaaccttttcatcctcatcgactcactctttgaatttggatgcaataagaccgaaatcatggaaattgttttcttcgtcatgggtgacgacaacgtccttttcactcactggaatgaagaccgcctttacgcgttcctcgttttcatcgaaaactacgccctcactcgttacaatatgattctatctaaaaagaagtcacttcttactgtgctacgctccagaattgaaattctgtcttaccaactccaaaacggtatgcccacccgacccatcggaaagcttgtcgctcaactcgcttatccagaacacggcccaaaagacaaatatatgtctgcccgtgccatcggactcgcttacgccgcttgtggccaagacccaacatttcacgaattctgcttcgacgtgtaccacatgttccttccttttgctgcacctatggatcaagaatctatacaggtcgcttcggcttatatgcccggttacttcaaacaattcgaacgaattgctgaatttatcgacttcactcgttttccaacgattgaccatatccgtaataaaatacgaaaatggcaaggcttcctctcacttgacaccaaatgggatcccaactggtttgtgaaccccccttacgctgtccctctcgacgccaagactatgactgattatcaagtcgaacactcgctgttaacccgagaaacaccgtttctatttcaacaggtctaa

SEQ ID NO: 1753 - DNA, 2169 bp, Trichoderma harzianum partitivirus 1
  source 1..2169: mol_type = other DNA
atgtcgaccaaccctcccattattactgagcttccacgctccgttgaccccaacgcaaccaatgttcgttatgcgcaattacttgaaacctatcgtaccgatccttcgaatacgaatcaacgtaacttgctcgaatatgccgaacatcacgggttcaactacttcatccctacggatgttccgcttcctgacgatcgtaaagccaacacaggcatcgctgcccttcatggttttcgttttcacaccgtcgctgcgtttcatcgttaccagaatatgtcacgttatggttatgacgccttaggcttcatctaccgcacaatcgttacgcttttctgtaacttcgtttggatgcttaatgactattgtcgaccctccggctccgccgatgctgtattcgagaacttcaaccaggctacaacacctgttgatcccattgaaccttcacgcttaggacaaataatgcccttgatgcatcacttcttcaagatcaagccctattgcccgatcgccttccctgatcttaggttttataaatggtctctcgtcacatctgcagattatcacgcccatcacagtaaggaccaacaagacgactccgctcgctattggaaacatcttaaggacaacgatcttttagataatcgttatgattattcagatcgcccacgttcaaaaggatacttcttcaacacggtactactttctactcgaaccatcgttcataacatcaagtacttccgcctcccttttcaacgccactctcgtgacacattggaatccataacctcgaaactctccttctggtttatgaaatatcccaccgtcatgtacgtccgatctcaaatctccaagctcacaaagcttaaagtccgtcccgtttacaacgctccttttctcttcatcttaattgaggctatgcttacgctacccctcatggctcaatgccgacttgaagattcatgtctcctctggggatatgaaaccattcgtggtggtatgcaagagctgaatcgcattgcccacggttatgatacttttatcatgattgactggtcacgctacgatcaactcttaccgttcgcgataatttaccatttctggtgcacgtttcttccacaactgatacgcgtcgatctaggctatatgcccaccaagcaatatccagctaagactcacactaaagcgttcactgagaaacaccacaaccacctgaaatccaacccggaatatgttaatttcgcctcacggctccctttttatgcgcctcacatcattatgttttcctttatcatctttaacctcatatccttcatctggctatggtacgttaggatggttttcgtcacgcccgacggatacggatacgtccgcctattggctggtgttccttcaggaatattcatgactcaaatttgtgattcattctgcaatgcatttctcattgttgacgcaatgcttgaattcggctttaccaccgaagaaatcaagcttattaaaatgctaattcaaggtgatgacaatgtcatcttctaccttggagatttctcccgcattttcgcgttctacgaatggatgccgcagtactgcctcactcgttggcacatgattgtctctgttgacaaatctaaaattacaaggcttcgtaatcgaatcgaagtccttggatacaccaacctaaatggcatgcctcaccgtgacgctgcgaaactcgtcgccaccctcgcctaccctgagcgctacgtgcaagacaagacgaaatacgtcatcttcatgtcccgcgccatcggcatcgcttatgcgaacgccggtcacgaccgcgaagtacacgatctatgcgaacgtgcttacaaacaagctcgcaaagattctggcctttcagttgatgaacttaaacaagttccaattgaatatcagaagctcggcttctacgagattttctccgtcaatatcgaagagttacgaactcatttgattcaggacgtttctcaatttcctgatttttatgatatacgtacaaaccttcgctactggcatggacctcactccgtctatcctatgtggccctcccactttgatgacgatctcgcgactataaagtcgcctaaaaccctcaccacactgtatgatgttatgcagtctgctggactggaaattccgaccaactattaa

SEQ ID NO: 1754 - DNA, 1620 bp, Trichoderma harzianum partitivirus 3
  source 1..1620: mol_type = other DNA
atggatgattttactctagatccaacaacacacctaatcttcaacgaggggtctcatttgattgacgaactccacctgcgtcccgccaaagcaggtcaagccaacagtgaagatgtggtgccatccaactttaacagtccgaacctccgtgaaatagctaaatacggaggctattcgacatattcgtctaactcgaacaccgatccttatgttcgagagacattaaaattatattcaagagatatctatgaggaaatccgtggttttactcgcagaccgcaaggaacaccaggcatgtatactgccttgaacaagtttagcggagagaaaaacaatttcgatgatctttcagtatcgcagcagtctagcatgcggcgcgcaatcgccaaagcaaagaaagcgttcaaattgccatacaagcgtgaacctttagattggcacgaagtcggccaattcctcaggcgtgatacgtctgctggagctacctttatgggagccaagaagggtgacgtgatggaagagatctaccatgaggctagatggttaggacatcggatgaaacaggatggaaaagagtcttttgatccaaccaggatgaggttccctccttgcctggcaggtcagcgtggtggaatgtcaacgattgatgatccaaaaacgcggcttgtgtggatttaccccgcagaaatgttggtagtcgaagggttctacgcccctttgatgtatcgtgactatatgagcgatccaaattcaccaatgttgaacgggaagagtgcgcagcggttatacaccgaatggtgctgcaaactaagggaaggggaaacattatatggtatcgacttctcgtctttcgatacgaaagtgcctgcttggttgattcgtgttgcttttgacattgtacgtcagaacatcgaattctcaacctttcagggtaaacctgtcggaaaagaagacgcccagaaatggaagaatgtgtgggatgccatggtgtggtattttataaatacacccattttaatgccggacggacgtatgttccgaaaataccggggtgtgccttccgggtcgtggtggacacagataatcgattcgattgttaatcacatattgatagattatcttgctgactgccaagatgtagagatccgaaacctgagggtactgggcgatgattccgcattccgctcaggcgaccagttcgatctggaagttgcgaagcaggattgtgtcccaactggcatgattatcaaacctgaaaagtgcgaaaagtcaaaagacccaaatgacttcaaattactaggcacgaagtataggaatggtcacgctcaccgtgatacggtagagtggtttcagttggcgttatatcctgagtcgagtgtttttaaccttgacacgtcgttcacgcgccttattggcctgtggctcggaggagctatgtgggatagagtgttctgtgagttcatggaattctatcaatcaagttattcttgtccagaggagggttggttttccaaggaccagaaacgatggcttgagatcatatattcaggcaaggcgccgagaggatggactaccaagaagagtctattctggcgatcaatcttctacacctatgggtag

SEQ ID NO: 1755 - DNA, 2139 bp, Tuatara cloaca-associated partitivirus-1
  source 1..2139: mol_type = other DNA
atgtcttctaatttactaagagactattataacgagaaacttctgcacctgcaacgagatttacaactttttcaattaacaggaaaagaccccagagcaacacttgaactacacaacgactccgatcttgatagaactgaacgcacattcaaactctcatcagcatttttcagtgccaccgatctttacgaatctgaaattaataaatataaatcagaaatccttaagtcatcacttcatgaaagaactcaaaaaggttatctctacattaaagaaagcaaatccgacaacaccaacgtccgaaatcacagagcacgctacaactgccctcctggcatcattcgcgtaccctatcaattcgccacgggtaatgttatcagaccaactgacgacgtccccgaaacaggattcccaatccaccccaggatcaaggcaatcatcacgaattcctatcctacgtaccaaacagcgatcaatgaattcgttagacctctcggaacaacagaagccacagtcacagacttccttaaagagcaaaggccatcagatccccccatctactcaagaaagcagcggatcctcaaacacatccatcacttccttgctagtaaaccttacagacccttgcactacgttgactcactctacagcgggctccctctccacacgggaacaggttatcataaccgacattccttcagagcaaaatgccacgccaagttttcacacccagccagatacaacggcaaacctacttcaaagggttatttctataatttcacacgacttagaaaccgtacctacatccaccagattaagctacggggccatcctctatcgcagaatggaccagatacgaaaacaagaataaaacatttcttacttaaaagacctacaatactattcacacgtagtcatatttccaagcgaaaagataatttaaaacaacgtcccgtttactgcgccgacgaacttttcttagatctcgaatctatgctcacttttccgttacatgttacagccagatcaccatcctgttgtataatgtatggctttgaaactcttagaggttcaaatgctgaaataaaccgtatagcacaacactttcgatcatacttaatgctagattggtcctcattcgatcaacgcttaccacgagtcatcacagatatattctggacagactttctagaagaattaattgtcatcaacaaaggctatgcaccaacatatgattacccaacttatccagatttaaccactgagaatatgttcaacagagttaccaacatgttacattttctacacacgtggtataacaatatggttttcgtcaccgctgacggccacggatttatccgaacagccgcaggcgtaccgtcaggtatacttaacacgcaatatctcgacagcttcggaaatctattcctcctcattgatggtcttatcgaatacggtaaaactgatcaagaaatcgaacaactaaaactgttcattatgggagacgacaactgcattttcacacaatggagtctcgaacaactggaaagtttctttaaattcttcattacatacgcgaatcaacgatatggaatgataatgtcagagacaaagtcaactatcacctcagatagaactagcatcgaaacactatcataccaaaataatcatggattcccaagaaaagacatcactaaactaatcgcacaattgtgctatccagaaagaggtgttaacgtaaaatttatgtcagcgagagcaatcggaatcgcttatgccgcatgcggtatagaccccgagtttcacaaattctgtgaaagcatttataatgaatttaaatctgattcaatcgaactggataatctagaaaccttactaaccgcacaaagtaaattacctggttatttaaaagtagacgaaacacttctacaaacaatcgactttagtcaattcccacacattgacatgatcagaaatttagtcctcaaatggcatggcccactaccaatgtcaccaaaatggaatgaatcacatttcatcaattcaccaaatgaacacgaaaaggactacatcaccgccttaggatacaggaagcactatcgagtacaacgaaaaccaataccaaatctatggaaataa

SEQ ID NO: 1756 - DNA, 2160 bp, Turkana Partiti-like virus 1
  source 1..2160: mol_type = other DNA
atggaaaatacaatccaagaagaatttattgaaatgagagattttctcgaagaaagatcccatcaactcaacgaaagatggagactgatcaaccagcacaatttaaaagatgctaatggagtcatcgattatgatgaactcgaacgattacacatcgaagaaaatgtcaatagacctattcaactgattacatcagcagaaggctacgaacatgacattaatgaactcattgaaaattacaaagcttcaaatatcgcaagagatgaagattttgaatttttccgaccgattaaggaatctgataaaattccagaacgagttaatgtagaacaaggactcaactttgttccattaaaatatcataaaacacgacctaaaacagcgtcacaacaaataacagaagaaggtttcaaaccagataaaccacttctagatttaattaacaactattatcccgaatatcgacgaataatcgaggaatatcgacgcccactaggaacgaccgattcaacatttaacgattttaacaaaccacaaaaaccatcagaaccttttacacaagaaaggaaagatcgtattctttaccatttaaagaaaaagttaaacgttaaaccttacaagcccgtttactatgaaagcattgctttctgtaaaatgccactcaacacaggcaccggctatttcgaccgttatcactaccgaacacgagcaagagctcgcttaacaagaagcggaatttataaagataaacctaacagtaaaggatatttttacacagcaacatacaaacaacaccaaattattgtacataacattaaacattatagatcaccagttataattaagactaacagtgacaaaatcaaaagaaacaaaatcgtacaggattttatcctaaaacgagtaacaatgttatttacacggaaccacatttcaagactatttcgacttaaaactcgaccagtatataatgttgatcctatcttcctaaaattagaagctagtttaacatttccagcaatgatacaagctagaccaattagctcatgtattatgtacagtctcgaaacaattagaggtggatgtcactatcttgatcacacagcaaagaattacagttcatatttcacaatagattggagttcttatgatcaaacactaccacgtgtaattactgatttctactatcaagattttcttgaaagtttaattgtaattaacaaaggatacacatctacaatcaactaccgacaacacattccccaacccgcagatgtattatttaagaaggcacataacatgcttaatttcttacatgaatggtacaactcaatggtatatgtaacctcagacggatacggatatcaacgcacatgcgccggagtaccatcaggattatttaatacacaatatttagactcagtaggtaatatcacattactaattgatgcactaatagaattcggattaacagacacagaaatagatgacattaagttatttattatgggagacgacaacacaggatttacacacatgaatatctttgaacttgacaaatttgtcaatttctttggccgctacagcaaacgtagatggaacatggatatatcattagataagtgtaaagtaacagaagatcgatcactcattgaagtactaggttactcatgtaactttggatacgcaaagagaagtattgataaattagtcgctcaactatgttacccagaacgaggaattaacataaagtacatgtcataccgtgcaataggcatcgcttatgcagcaggaggacacagttcaacttttcaccaattttgtgaaagagtatatttcatatactataaagacagagtcgacatcacatcagatgtacgcaagaaagtagtttatcacttaccaggtatttttagagcagtagacaactacgccgaatttattaacttcgaaaaatttccaacaatcgaagaagttcgaaaagaatactcagaatggaaaggatcgttatcatacgaaccgagatgggattcatcctatttcaccgacccaccatattatgatggagacgattacataacgataaaagactataaaaagattcacaatattgaagacttaccagtggaatttcacgatttcacttcattatccaattag

SEQ ID NO: 1757 - DNA, 1419 bp, Turkana Partiti-like virus 2
  source 1..1419: mol_type = other DNA
atgctacgatatatcggtaaaacaacaggttttgcgagccgtactttcgctcgcataagtaaaacaccttatttaaatgatttaccggagcccactgaattgtggaggtctccagtgacacagcatttaatcgaaaaagatttacgagagtttgacaactcttgtaaacgtcctgatagttatgaactcgacttagctatcatggatgctgaaagagcgttcagattagagaatcgtgttaaaatgattcacttaaatgatgtatttcaacaagatcttgaaatatggactaggtctcccggtctaccatggaagaatcatggttacgatacaaaagatgcaattcgtaaagaccctgacgcagtacaatcagtcagaagattctggcactttgttaaactcggaaaaccaatatcttttcctgactgctgcgcatatgtgaggagccacattactgaacgtgacagctacaaagttagagcagtatgggggtatcctgctactatcacctttggtgaagctgtctttgctgtgccacttattagggggtttcaacgagaacaaaagaccatagcctacggttttgagactttcctcggcggatgtaagaaaattcgagattacttaggtggagcgccttggtatgcagctctcgattttaagaagtttgataagaccgtgcccgcctggttgattcattgtgcgtttgccatattagcacggaacatagattttggcaattacgaagactatggtactgcagactgtctaagaatgtaccatatgtataagacacttgaggattactttatcaacactacaattcgtacagcacgtggacatagattcagaaagaacagtggaattgctagtggtagctattttacacaattagtcggatcaatttgtaattatatcataatcaattatttgtttagaaaacagcgaattaatatcataaatttgaaagtgcttggtgatgatagtattgtttcatccaccgaaaagtttgatttaatgcaaggccaaattgatgttatgcgccttggcttaagattaaatattggtaaatcagatatttctaatcagttagatgacttagttttccttggatacaaaataaatcatggttttccacttaaatcacataatgattggctagcatcacttttgtatccagaacgtccagacgaaagttttgacgatgttgcatcccgtgctttaggaatttattatgctaatatgggtgttgatcccataattcataaactttgttatgggttaataaaattaaaaccgtttgacctcaagttgtctaccaacttcgaaagaatgttaagacacataggtgtcaccacaatgaatcctcaaaacccccccgattcagtagagttcatggtcagaatgggagttttgtaa

SEQ ID NO: 1758 - DNA, 787 bp, uncultured partitivirus
  source 1..787: mol_type = other DNA
atgaccatcgaagctcaatacgaagatatgatgaagatgaatcaacccccggttcacatcgtccaagatgatgccttcaacactgctttcgccctcactatgaaagccttcgctcccaccgaaaaggtccgagtcgtacactatgtacgtacaaagcactacccatggcccctgtcctcaagtgtagaacgcccgttctcagttgacccgactgttcgcaagtatgtaaaagaaaaatgcatagcccgagagatcgttgacgaaaagatgtcgttccacaacacatttgagtatgtctataacgccctccgccaccctgtccaccgaattaagaatggagaatgttttacaggagatcttaccaaggattttctatatcccatcactgcccattttcgtcccggacttggaaaaccaggctcaactgccatcaagaaccgtcttgtatggggagtatccaaactattcctcatcgcagaatgcatgttcatgtacccactgtttgataactacctccgtcatggaaccacccccatgctttggcactacgaaactatccttggaggaagcactaagttacacaacgaagtgactccccaaatatcccgaactcaagtcacggttataaccgccgactggtcagaatttgaccgtcgagtacctttcgaattaattgaaatggttattaatgcctctcttgaatactatgatttaggatactacgcacctgattatctctatgataccagatcaagctgtaagtacgatattcccagaatactaaacc

SEQ ID NO: 1759 - DNA, 1620 bp, Ustilaginoidea virens partitivirus
  source 1..1620: mol_type = other DNA
atggaagattttactcaagatccaactcaccactacgtactcggaaaggggtctcgtttgattgacgcactccaccttcgtcctgccaaagaaggtcaagccaactccgaggaaatagttccttccaattttaaatccgatactttgcgagagattgcgaagtacggtggctactcaacgtattcatcgaactccaatacagatcctcatgttcgtgaagcgttaaaactgttctcaagagatatctatgaggacatccgtggtttcactcgcaggccgcaagggactccgggcatgtacggtgccttagctaagttcagcggtgagagaaacgcgttctctgatctttctgcctctcagcaagcttcgatgcggcgtgcgttttcgaaagcgaaacgcgcatttaagctaccatacaagcgtgaaccgcttgattggcatgaagtgggtcaattcctacgacgtgatacgtcggcaggtgtcactttcatgggtgctaagaaaggcgacgtgatggaagaaatctatcatgaagcgaggtggctaggtcacagaatgaaacaggatggaagagattcttttgatccaaccagaatcaggttccctccctgtctggccggtcagcgtggcggaatgtccgagattgatgatccgaaaacgcgcctggtgtggatttaccctgcagagatgttggtagtcgaagggttctacgcccctttgatgtatcgtgactttatgagcgatccaaattcaccgatgttgaacgggaagagtgcgcagcgtctgtacaccgaatggtgctgcaatctgagggaaggggaaacactatatggactagacttttcagcctttgacaccaaggtgcctgcttggttaattcgagttgcgttcgacattcttcgacagaatatcgagttcagcacgttccaaggaaaaccagtgaacaaagaagatgcccaaaagtggcgaaatgtctgggatgccatggtgtggtattttataaatacacccatcttgatgccggacggacgtatgttccgaaagttccggggtgtgccctccggatcgtggtggatccagatgatcgattcagtagtcaaccacatactgatagattacttagcggactgccaagatgtagagatccgaaacctgagggtattgggcgatgattccgcattccgctcaagcaaccagttcgacctggaagttgcgaagcaggattgtgtgccaacaggaatggtcataaaacctgagaagtgtgagaggagtgaagatccatcggattttaaacttctcggaacaaagtatcgaggtggacatgtcttccgtccaacggaggagtggtttaagttggtgctctaccctgaatccagtgtgttatcattggatatgtcgttcactcgactgataggcctatggatcggtggtgccatgtgggaccgtaagttctgtgaattcatggacttctaccaatcagcttaccctgtgcctgaggagggttggttttccaaagaccagaaaaggtggctggaggtagtgttttcgggccgtgccccaagaggttggactaccaagaagagtctcttttggaggtcaatattctacgcttttggttga

SEQ ID NO: 1760 - DNA, 1590 bp, Ustilaginoidea virens partitivirus 2
  source 1..1590: mol_type = other DNA
atgaactcatttgaaaacttcggttctttcaaacttagtgctgacgaacttgctgcgactgctgtccctcccacgccctggaacaatgtttttcgctacatcacagatgcgaaacggtttcccggttacaaacgtggtattctacgacagacacaactgtacgacccgtacgttaacgcagctttaaagagttttagcccggaacttcacgattccatcaaaggctacacgcgtgcccctggtgacgagtgggatgtttacgaacgtcttacacgatatgacaaatcacctttggctcctgttgacaatccgcgtttcaaagcctgttacgatgccgcactctcagacgttatgaaagagttcaaacttcgtgatcctgttgttccgcattggattctggacgtcgatcttgtgaagaatacttcttcaggatttccacatttcacccgcaaaggtgacattctggatcaaatccgccaagaaggtcgaagccatttccatctgctaaagcgccttcctttgtggagagtacccttgctgccttgtactcctgcaacacgtggaggtcttgccgacatcaccgaaccaaagacacgtttggtctggatgtatcccgccgccatgactgccgttgaagctgttttcgctcagcctctcatcgatggtctcttttctgagaaatcagaatatttaatcaccggcgtagatactaaacaccggatccaacgctacctgtcgctcctttcagaggatacaggtcgtctcggtgttggtctcgatttcaagtcctttgacactttacggtgcaattggttgataagagatgcctttgacgttctcaagcagaatgtctacttttctgggtattatgacgatacgaatggtttacagacatttggtcccggaaaaactgaaagactagaacacgcctggtcaaatattgttgaatacttcatacatacacccattcttctcccgaatggtcgatgtgtcaacaagcatactggtgtgccctctggttcccacttcacgaacttgatcgactcaatcatctgcagaatcttaattaagactttctctctttactgcagcattccgatttccaatctcagaacgaatggagatgattcagctttccatgtttacgaagactacgcttccgacattattcttcgtgccgctggattcttcaaggaattctttggaatgacgattaacacagacaagtcgtgcgttgctggctcgccctctgaaatgcatgtttctggaacccgctggacggggcttcggcccactaggtccacccaggaatggatgatgcttgccgcttatggagaaacctactctaggataccgttcgattcctttcaacgtttactaggtttaggattatctggaggttttggagactcaaccttcaccaggttcttcgattatttccaaacaggttatgattgcagacatggtcccaatctcctcaactggaagaaactccgcttcctacagcaaatctttagcatagaagagttgccgcttgtttacaagcaaggtgccaagacaacactccgccttcgcctactggttacttaa

SEQ ID NO: 1761 - DNA, 1569 bp, Ustilaginoidea virens partitivirus 3
  source 1..1569: mol_type = other DNA
atggattacagtgttggtggagaagaaacgtttggtgacaagtttcactccgtgtgggactttcccttacgccatttgtcggaactgaagaccatggatttcaaacgtggtgttcttaggcagacgcaggcttacgatccctttgtggatgaagctttgcgacatttcgacaacgaccaacgaacgcggatcatgggctatacccgtgcgcccggcgatgagtatgacttggccgaaaggttgaggcgttacgatgcttcaccccttcacctcaagttcacgaatcgcaggtttgccgctgcttattcggaagcagttgctgaatgcatggacgagttgaagctccacagtcccgtcgttccccgctggatcaaggacgtcgacttggttaagtctacctcctccggtttcccgcactttaaacgcaaaggtgatatcatcgaagatatcttgcaggaaggtcgatttcactttcaccatctcaagctctacgagttggatcggtgtccattactcccatgtaccgttggagttcgtggacagctttcggaaaaacatgatccgaagactcggcttgtgtggatgtatcccgcagctatgacagcatgcgaagcagttttcgctcaacctcttattgaggcaatgtacgacgagaagcgagactacttccttactggcgtggacgcgaaattcaggattcaacgattcctatcactactcgatggtgataaggatgcccttggactgggtcttgattttaaatctttcgatacttttcgagtgacacagctaatttacgacgctttcgctatcttaaagcaaaacattctttttggctattattacgatgatgttactggagtacagaaagggagaactggagtagacgttcgtgcgatgagagcattcgacaacatcgttgagtactttatccatacgcctattctcttgcccaacggcagggtagtgaagaagcacttgggtgtaccttcgggctcacacttcacgaacctaatcgactcgatcgttaacaggatcctgttgaaaacgttctcgaaatactgtcttcgacctcttcacggtttgaggaccaatggcgatgattcttctgcccttgtgtctcggtgttatgcatcagacatcattgatgaggcatcttcattcttttcttctttctttggcatgactgtatctgtcgataaatcagtcctagccgaaggaccctctaccatgcatgtttcaggcacgcgttggttagagctacgaccgtacaggccaacagacgagtggtttaagctggcgtcatattcagacacctacgtggctactccttttgattcgtttcagagaatgttgggcctaggcattgccggcgcgttttgcgactcccggtactgtcggtttttcgattactttcagcgtggttacgattgctggaaggattcacccaatcttctgaattggaagaagttgcggtggctggagcacgccttcggcatcacggaattaccaatcgtttacaaacaaggttcgcgcaccacatcgcgccttcgtctcctggtcacctaa

SEQ ID NO: 1762 - DNA, 600 bp, Ustilaginoidea virens partitivirus S2
  source 1..600: mol_type = other DNA
atgatgactgttgatttcgtgtatgatgacactctcggtgaagacatcccatccgtttgggactaccccctccggtacgtaacagatactaaacgttacaccggacacaagcggggcattcttcgccagacgcagcgctacgatccattcgtagatgytgcactgaaatcgtttgatcctgagctcgctcgaaggattcgcggttacactcgctctcccggtgatgagtatgatctcttcgacaaattacgcaaatacgatcatgctcctcttgaactgccaactggcagttcccggctcacagcttgttacgaaattgctgtggaagaaacaatgcgcgagttgaagctcgaagcacctatcgtgccacactggatcttggacgttgatcttgtcaagtccacatcttcaggttacccgcgcttcaaacgcaagggtgacattcttgaccaaattcggcaagaaggacgatttcattttcatcacctcaagctttacgacttacatcggtgcccacttctcccttgcaccgttggtactcgtggtggtctttcggagtccagagatccaaagactaggcttgtgtggatgtacccggca

SEQ ID NO: 1763 - DNA, 403 bp, Valsa malicola partitivirus
  source 1..403: mol_type = other DNA
cggccaagatgcggttccctccgtgtcttgcaggtcagagaggaggtatgtcagatgcctctgatccgaagacaagattagtctgggtgtatcctgctgaaatgttgtgtgtggaaggtttctatgccccagaaatgtatagagccttcatggaggatccaaacacaccgatgttgaacgggaggtcagcgcaacgcttgtacacagagtggtgcgttgggttaagggatggcgaaaaacttgttggtttagacttttctgcattcgataccactgtgccaacgtggttaatacgtgttgcgtttaaaatacttcggcaaaacgttgagtttgatactttccgtggtgagcgcgtgtcgaaacgcgatgctcagaagtggcgtaatgtgtgggatgcgatggt

SEQ ID NO: 1764 - DNA, 1404 bp, Vandelay partiti-like virus
  source 1..1404: mol_type = other DNA
atggcttatattggtaaaacttacggattttgccaacggcacttcactgttacagaatctcactactgccctaacttggctatcttaaagacagaagacttggttagaagtcctgtcacgctagatttgataagggaagatgtgaaacagttccaatctccatctcccatgcgccctgagaacgacatttttgatagtgttgttcgtgatgcatttaaggcttttcaagtggaaaaggtgcatcctatccacttaaatgatttgcctcagctgacgtcggacacagacaattcatctcctggattaccttggagagatcgcggatatgcgacaaagaggagtgttcttgatgacagagatgcttttcagagtgtacgaaaattctggcataggataaaagaaggtgagtgcatgaaagcacccgactgctctgcatttgtaagagcacatctagttaaatctggagaaaccaaagtacgaacagtgtggggatatcccgcaactatatcttttcaagaggcttgttttgctaagccattaattgaagaatataaaagacaaggacctattgcttacggttatgaaaccgcgaaaggtggctgtcgcaaaattctcaatgaattctgtcattacaagtactttttgagttcagattacaagagcttcgataaaacgattcctgcttggctaattagaattgccttcgatatcttaacctttaacatcgatttcactgagtattgtgaatatggagtaccagtttcccgtaaattgtatcaagcctggttattctgtatcgattattttattaacacacctattcgcctatgtaacggagaacgttaccgaaagaggaaaggcgtagctagtggtagctatttcacacagatgattgactcaattgtcaactggatcgtgaccacttatgcattacgttcgatgggtttaactgttgataagattatggttatgggtgatgacgctttggctgctgtttcaggtcatgtagatttgaaactatttgctgaatttgctcaagaatgtggaatgtacgttaacatcgagaaaactcaattctctgaatgtcttaatgacataaaatttcttggatataagattaatggcggatctccccttaaagacccaaaggaactatgggctgcactgcgttttccagaacgtcctgaccgatgttttgatgactttgtatcgcgagcatatggacttatgtttgcaaattttggtaatgacatcgaattcgacaattgttgtcgtcattatgttgagaagccgtttaccatcaggctaactcccaacatgattcgattcttaaagatcttaggaattgatgcattacctctggaaccaccgactaggttccaactccaactcctacgttattaa

SEQ ID NO: 1765 - DNA, 1662 bp, Vannostrand partiti-like virus
  source 1..1662: mol_type = other DNA
atggacgccccaaaatcgtatattacgaaaactcggcagatgccgtcaaatttaacaacattacggaaccttccaaaaggaaaaggattccctatgaggttattacctccacgcgaagacccgctcgcgagggcagcaactgagcaatattttggtctcgaaaaagttgctaaagttatggcaaaataccatcgtagtactatctcttacgaggctatgttatcagaccttaagcgttatgattgtaagagagctcctagattggaggatgatttgtactgcgccgtactacaaacagttattgaggacatattacctaaggaaaggattattccttataagattgaagttgtgtctaccttagcggaatttcccaatactaaatcacccggtttaccctataaactagaaggcttcaaaacaaagcgcgaggttattgaagcgggtaaactatccgacatctcaacgacctggagagaaattggttttgggaagaaaccaaggcttccagacgtgtgcctttttgctcggtcacaactagctaagactggcaaagagaagatccgtgccacatggggttatcccctgtcagtgtatatggaagaaggtagatatttctatccttttcaagatcatattaaatcccatgaacacaacttcccgatagcatatgggttagaaatactgaatggtggcatggcaatgattgacactattgtcaaaagaaatgagaatgcgaaatacgttatgacagactggtcccaattcgataaaacagtacctgcttggctaatacgggacgtattttctatcataggtatggcattcgatttttctaaagagcgagacgctaatggtaacatatatcatgtgaggcccgcaatagcgattaagcgttggcgatatatgattaattattttattgacactccaattaggacttgcaaaggagagaggttcctggcacttggtggggttccaagtggttcatgctggaccaacattgttgattcagtgataaatatgattctcagtagatatttagtgtttgatactactgggcatttccctgcggatgaaatatttttaggagatgatgcttttttgtgcgtaaatggcactgttaatttagatgacatggcagacttagcccttaggaagtttgggatgattatgaatgtagacaagtcatacgtcacaacacaacccgcgaatgtacatttcttaggctactacaataagtcgggcaatcccttcttctcaatggatccgttaatcgcatcctttattcaacctgagtacgagagatcaacgttactcgagaggtgctctgcagctattgggcagatgtattgttgctgtgatccagggtatgctgtgctatggtataaaatagcctctagtatcgctgcgtcggataataagacgtttgaagaggtatttatttacaccagagactcctatcatcgtaacaaggacctacaacaaatgggtttgacccaagaaaagatgacagtaccatctatctgtcatgattatataatggacgtactaccaccattaaattgtaggatatttatcagacctcgaaaatataattataatgaattatgggaaagaacgatcctaacgttcaaggattcaccattagatccggagtga

SEQ ID NO: 1766 - DNA, 1098 bp, Varnsen partiti-like virus
  source 1..1098: mol_type = other DNA
atgtatatcgcaagaggaaaaggctttgaaccaccacaaccctcaccttatctaagtagttttcatccactgtgtggcaactatactggaagtgaagtggcgctatcgctaatacgtgaagacataaagcagaatcgaatgaatgaacatgcacaacaaccgaatgatcgattgatgacttacgcaatccaaagggcgtttcacgcctttaaactaccaaataaaccgccacttttacacctgagcgacgtctttcaacaggacttgcctatttggaactcatcgcctggtttgcaatggaatcaatgcggatatagaactatgggcgatatccgacgtgatccggacgcgattaagagaattcggtacttctggtatcagattaagactggccatgacatcaggctgtcacactgctgtgcatatgtacgttcacatatttgcgaacgcggcgaatcaaaggttcgagttgtatggggttatcctgcaaccgtgacctttggagaggctgttttcgctgtccctctgattagggcataccggaaacatcctatattgcaacgatttcggggcacgcagttcttgggaattgatttttcagaattcgataactctttaccttcatggctgatgaaagcggcatttagcattctagcgtataacttagactttacaagatatcaagatcatggaatccctcatactgatagagcaataacgatgtgggaaaccatcactgattatttcatacatacaaggataatgatgtgcaatggcaagctctaccggaagaagtctggcttagccagtggtagctatttcacccagctcgttggaagtatatgcaattacatcctcttgacttacgcagccctaaagtgtcatgtgagatttgaaaacttatttgttttcgggaatgattccgttatgagcacatgtgatcgttttacaccagatcacattcaggaggtgcttgacggacttggtatgacgtttaatgttgcgaagtctccaatctcccgcaacatttcttatctaccattccttggatatgggattagcaatggttatcctcctctaatagatatatttaaataa

SEQ ID NO: 1767 - DNA, 1620 bp, Verticillium albo-atrum partitivirus-1
  source 1..1620: mol_type = other DNA
atgtccgacgacattgaaattttcgatctcctcgcctccccgggcgagcaacctggatctgatgagacattcgcgagttatgggacgccatcttctcgcactgctcgtcgtcacgtccaggccggagagtactttattggaactggccttgaagaaatagctagatacggcggctattcttcccatagggcctcgggtaatacagacccgtgggtgcgcgaaaccctaaaattatacgatcccgagcgctatgaatccatttatggattcactcgtacgggcgaaggtcttcttggagcatacaaatcactcttcaagttcgatggacctgtcgcacgtggcactcggctttccactcgtcagaggtctgcaatgaagaaggccatcgctgatgcccgtactgctttcaaacttccagtcaagcacgaacctctcgactggcatgaggttggacaatttgtcaatcaatcgacctctgctggtgtttctttcccggggaaaaagaaatctgaggtcatggaagaaatctataccgcagcccgttggctaggtcatagaatgaaggaaggtggaaaggaatcgtttaacccaaccaaagtcaggtttcctccagctcttgctggtactaggggtcacatgtcaccgaaagatgaccctaagactagacttgtttgggtttaccctgccgagatgcttgtcgttgaaggtctgtgggctcctgtcatgtacaggcagtaccagtcactttctgatgggccgcttttactcggcaaatctgctcagcggatctacaccgaatggtgtgtcaataaaaagcaaggcgaagtccttcatggacttgacttctccggtttcgataacggtgtgcctccttggattatccatgttgcgttcgacattctgcatgcaaatgtagattggttgaactggcgtggtaaaccgacttcgaaacgatctcgccagaagtggagaaacgtctgggatggaatgaagtggtatttcatcaacacgccaatcctcatgcctgatggacgtatgttcagaaagcatagaggtgttccctctggtagctggttcacccagctcgttgatagcgttgtcaactatattctcgtcaagtacgctttcaactgtcaggaactcaaaatccatgggcttaaggtccttggtgacgactctgctgcacgctctcctctcaagctcgaccttgtccaggcggcagtcgacttccgaccggtccagatgcgcttaaatctagacaagtgtgaaataacggaagatgcaacagagttcaaacttcttggtaccagatatcaagatggccattctacccgtcctgacgaggactggtttaagatggcgctttacccagagaacccacctcctgacatcgctgtttcaatgacgcgactcgttgggctctggttgggtggggcgatgtggtctgcagatttctgcaagttcttcgaatatttccaatcgtcctatccttgtccatccgaaggacacttttcgaaagaccaacgacgatggttggaaattgtgttcggcggttcagctcctcggggctggacatacaaagaatcgctcttttggcggtctatcttctacgtcttctag

SEQ ID NO: 1768 - DNA, 1620 bp, Verticillium dahliae partitivirus 1
  source 1..1620: mol_type = other DNA
atggaagattttactcaagatccaaccacacacaacatcgttgctgaggggtctcatttaattgacgcactccaccttcgacccccaaagtcaaggtcagccaccagcgaagatgttgtctcttccaactttaggtcacccaacctggcggagatcgccaaatatggggggtactcaacgtactcgtctaactctaacaccgatccttatgttagagagacattaaaactattttctcgagacacctacgaggatatccgtggtttcactcgtcgtccgcaagggactccaggcatgtacactgccctgaagaagttcagcggagagcgaaacacatttggtgatctctcccctagtcagcaatcttcgatgcgccgtgctatcggcaaagcgaagaaggctttcaaactcccctacaagcgtgagccgcttgattggcatgaagtgggtcaattcctaaggcgtgataccgccgcaggagcaacattcatgggccaaaagaagggtgatgtgatggaagccatctaccatgaggctaggtggttggggcaccggatgaaacaggatggtagggccggtttcgatccaacccgaatgaggttccctccttgtttggcaggccagcgtgggggtatgtcggagattgacgaccccaaaacgcgcctggtttggatttaccctgctgagatgttggtagttgaaggattctacgctcctttaatgtaccgtgactttatgagcgatccaaattcaccaatgttgaacgggaagagcgcgcagcgtttgtacaccgaatggtgctgcaagctaagggatggggaaacactatatggcattgacttcagttcctttgacacgaaggtccctgcgtggctaattcgtgtagcattcgatattctgcggcagaatataaactttgagacgttcggtggcaaaccagtcgacaagcaggatgcacagaagtggcggaacgtttgggatgccatggtgtggtattttataaatacacctatacttatgccggacggccggatgttccggaagttccggggtgtaccctccggatcatggtggacccagatgatcgattcagtcgtaaatcatatcctgattgattatcttgcggattgccagcgtgtagagatccgaaacctgagggtgttgggagatgatagcgccttttgctctggtgaccagtttgatctggaattagcgaagggcgattgcgagcctactggtatggtgataaagcccgagaagtgtgaacgaaccaaagacccaggtgagttcaaactgctgggtacgacatatcgggggggccatgttttccgtgacacggaagagtggttcaagctcgctctctatcccgaatccagcgtgctgacgttggatatttctttcaccaggttgattggcctgtggctcggtggagcaatgtgggataagaggttctgtgaatacatggacttcttccaatcaagctatccttgtcctgaggaggggtggttctccaaagatcagaaaaggtggcttgagataatctactcaggcaaagcgccaagaggttggacttccaagaagagtctcttttggcgatcaatcttctacgcctacggctag

SEQ ID NO: 1769 - DNA, 1623 bp, Vespa velutina associated partiti-like virus 1
  source 1..1623: mol_type = other DNA
atgaaagacctcggagaggcaaaaactaaaattagggtgaagtaccctcgtaacgtttcgaaagccgtgaaacagttatctgatggacaaggtttcgtgatgaacatgacacctgcacgtgaagatcgcaaagccagagaagcttgcgatttatatttcggtcctgaattggttgggaggataacttcccatttacaacgcagtactatgaattatgaagcaatcatcgatgacctactcgagtatgaccgagctcacgttcccaaaaataaaattgttggtgagagtagagttatttatgacatggtcatccaatctatcaaggatgatcttggtactccaaatctcgtgcctatggagtatgaggaaattcgtagtatgccggattttcctggagctaaaagtcccggtttaccttataaaaatcaaggatatacgaataaagcacaagtgttcgatgatcccgcatgcctggaggctttgaagaatacctggcgtgatgttggacatggcaagaatgtacatttgcctgatgtatgtctttttgctcgagcccagattgcacgacatccgaagcaaaaaattcgtgctacttggggttattcttttgatatatatatggaggaagctcgttatttttatccaattcagaattttattaagcaacataaacacaactttcccatagcctacggcttagaaatggctaatggaggcatgtctagtataaatgatatgcttatgcgcaataaaggcgctaaatttattataagtgactggagtaagtttgacaaaaccgtaccagtctggctcattcgtgatgcctttgatattctatttggtctattacatcctaatcgggttggcgtatatacccgtcgacgttggaagaaaatagtcgactacttttgtgagactccgattcgtacatgcaagggcgaacgatttcttgtgaccggaggtgttccgtccggttcttgctttactaatattgttgactctatcatcaactgcattgttacgcgattccttagttatcaaaccacatctgaatttcctataggtgaaatctttcttggtgatgatggtgtttttgttatgcgtaaacatgcttgccttgaagacttcggatccttggctttattgtattttggcatgattttgaatgttgataagagctatgttaccactaatcctagtaatgttcattttcttggatactttaatctgaatggtgtcccttttaaaaaccaagactatctgattgcctcgtttgtctaccctgagcaccgtcgtactaagctcattgacgcttgcgccgctgcacttggacaaatgtattctggatttgacccctactttgcaagaacttggcttaagataatacattaccttgctgataacgaacgcagtgaccccttttctatggatgaggttgttattcacttgcgcagccaagaacaccgacataaatatttatctcatgtcggcattaaaggagaacatatgactgttccttcactcgcccagacctttatccatgatgtgttacctaaacctaattgtaacataaatctaccgaatagatactacgattatcgtaagttgtgtaattccacgtga

SEQ ID NO: 1770 - DNA, 1239 bp, Vespa velutina associated partiti-like virus 2
  source 1..1239: mol_type = other DNA
atgcaatacagtatccgaactataatcgctgattttcatttttcatgcgtcaaggatcgacctaaaccaacgaaggtcaacagtccacacacgaaggatgtcgcacccattctacggaaattcttggcaaaacatcgaccacgaccagagaagtttgtaattccagagtttccattcttgaagagtagttaccgagttcgtcatctgatggacgctattgcaaacttgagccagcagagtttgtcatcaagtcctgggttcttttataaatctaaaggatttatgacggtgaaggatgtcatctcgtctgtagataacataagacggataagagctcgagcacactatatcaagaagggtagtggaaaaccattgccgctgtgcacagtatctgtagcacgcgcaatatatgatctagagaagaaagaagtcaagcgcagagttgcttggaactttcctttcttagtgcgcatattygaacaaatgtttgctcaacctatcattgagcaattgccagatcattacatcttggatcctaagactcatcacaatacgttatgcggagaaggcagtgttaaaactgacttcagcaactttgatgccagtgtaccatactggttactcaaagaatgcgtggataacctgttcgcacgtattgargatgattatgagcatgatgagaagaagttatctctcatgccattacttgcggccctcagattgtacatcttgagaactccgtatatatataaaggtggacattaccggaaatatcatggagttccttctggatccgcatttacgaatatcctggattcaatggcatcatatgcgttattatataacgcacatcgcgaatgtttcggaccctgttatattgcaacctacggggatgatgctgcatataggtgcggttgtagctttgatcacgtagcgcggtacctcgaggatgagtgtgggatgaaggtaaagaaagaagaaggattaggatatggatgtatagtctactgtaagaaatactgttattttggtacaccaatacatccaaccttatggtttgttaacatcctgaattgtgtccgccactggaaatatagacgtggcgttgcttggcagttagcgcatgcaccttttaatcctaccccaaatcagtacgatctactgattaaaagatatcgagctaggcccggtcctttaccgcgaaggctcttggaatatctgaatctcctccgagagtag

SEQ ID NO: 1771 - DNA, 1338 bp, Vespa velutina associated partiti-like virus 3
  source 1..1338: mol_type = other DNA
atggcacagcgtgtcaccaaacacccctttcaaacaaaatggattaggtcaaaacctaacccaactaagatcatcgaacgtatacaaaaatacttttgtaggcgcccgccccggccgactaactatagatattcatctgctctgtttaaggctagagaggcatttcgccttccttcacgtgttaatcctttccacgtaaatgatgtcatacgacactactcgcaccctgaccggagtcctggtctcccttatactaaggaaggattgcgcagaaaggatgaagtcgatccgaatcggatcaaatgggctgtacatgctatgaagtatggcatatggacaaagtgcaagacgccatgtaacgcagtggctaaaaccgcagtgcacccgacggaagaaaaattgcgattgatatgggtttaccccgcccatatgaccttcgctgaaggcatgttcgcaatgccgctcattagagcctacaagaaacaacttggctcaccttacggcatttggattcgctaccagtgtggcgatatgagatacctcaggtccaagaagatagctggatatacctggctagctgccgattggagtggctttgattccacagtaccaccgtggataatccgggatgcattccagatcctgctcgaaaatctggacttgtctcgctacgagtttcgcggcattccaacagacgctacatcgctcccccgtctgtggaagacaatcgtgaattacttcatcaatacacccattaaggatccaaatggtagtgttcgtattaaagctggtggggttcccagcggaagctactttacgaatctgatcgactcaatagtgaactacatcgcagtagcgtacctcctggacggcaagaattaccaaccttctgctttctatgtgatgggcgatgatgttctggttgccattaaggaaggcgaaatcagtttgaaagagtttgcaaccgaagctttggatgtgtttggtcttgaactaaatgtatcaaaatcagaaattggagagtttcccagtttccttgggtttaagtttacactaactggagttcccggtagtgattacgataggctcatggcacaactgttactgcctgcacggcccgatcgcactccaagcgaattttatgctagaattcgagcattacaactagcatcctttggtggaaataagcgttttctttatgaaacccagttttacctggagtcagtaggctgcccacatccacctcgttccttacatcggcgggatgaattatcagataaattggagcacctcggattggtcggttggccaccgttagaatccatcctcgcaatttaa

SEQ ID NO: 1772 - DNA, 465 bp, Vespa velutina associated partiti-like virus 4
  source 1..465: mol_type = other DNA
cttgaatatcttatggattttactaaatatagtgatggatcgaagaccaatgcatcacgtttattcaactgttgggactttattgtgaagtatttcaagtttactactatcagactagctacaggcgaacgatttaagaagctagttggagtcccgagcggtagtttctttacccagattattgattctattgttaatcatttgattattaactgggcttttattaaacagactggagagccaccaaagtatatcaaagttcttggtgatgatagtatttgctccagtgaagttaagtttgaccttgatgacgctcaagatgattttgccttgattggaatgtgtctcaacgtcagtaagtcagcggtctctagacatcttggaaatcttgaattccttggataccagatcaatgatggcgtcccttctaggccataccagaaatggatttcaagtttagcgtat

SEQ ID NO: 1773 - DNA, 1469 bp, Vespa velutina partiti-like virus 1
  source 1..1469: mol_type = other DNA
gtttagaatttagcttaatcatagctttcgtattgaataacacgaaagctatgattaagctaaattctaaacaaggctttggtttaaaaccaaatgctgtagactattctccttatgccgtgcatttgcttggtccacgtcctgatctttcaattagatctcgtttatctttcagattagtaaaacaagatgttttacagatgggaagaaattcatttgtaattaatgatcctgattacagatatgctgtacttctggcctttgacgcttttaggttagaggaaagggtagttccaatacatcttaatgatatatttgatatggatttggagataagacgatcatcccctggtttaccatggatgcccatgtataaaactaagggtgaggtaatggattgtagttccgcacgaaattctatacgttggttctggcacaacgtaaagaaacaagtgagagtctacccgcatgacactcgtgtgctgtaccgttcacattttatggaagatggtgaacctaagatccgtgcagtatacggctatcctgcaacaatgacgtttggtgaggcacaatttgcactcccgttgataaaagcatttaagaatgtgaacactccaattgcttatggttatgatatgatttctggtggcgctatgcgtttacgtcgtgaaataaataaatataaatttttcaattgtgttgattttagaaggtttgataaaacagtttcaaaacaattaatagttatagctttctcaatacttgaacaaaatatcaatttcactaaatatcaagatcatggagttcccgatggcagacggttgtatagatcgtgggaatttttacaggagtatttcgttcacactttagtgcgtttacctaacggtgatcgattccaaaagaaggctgggattccgagcggttcatattttacacaacttataggcagtgttgtgaattatattatattaacatatgcatcgattaagcttaccggccgtccaccacaatacataaaagtatttggtgatgactctgtgtttgcaacacatgagaagcttgatctgtatgatttagctcgttttattgactcaattggtatggagatcaatttaaagaaaagcataataacagaaaaagttgatgagatagagtttcttggtttttgtatagctggaggttttccacatagagcattagataaatggttaacatcattgtattgtccagaatatcctgatagttgtattgatgattttcaaagtcgtgctcttggactagcttacgcaaaccatggaattgaaccaacttttgacgcaatatgccgagctatcattacctgctctccctttgaagtgatgatttcacgtgatttcggccggtaccttcttaacataggagtcgatccctcgtcattgtcaagaaatctgcctactagacgtgagtttatgttctcactaattagatag

SEQ ID NO: 1774 - DNA, 1374 bp, Vespa velutina partiti-like virus 2
  source 1..1374: mol_type = other DNA
atgttaaataatgcattaaaattgtcatcgcgtctaagatactatgactatgtcatgctcttagmcgcgatgacaattttaatgcattatttaacatgtggctgcgtacgcagaccaacgttatttcagcaacctaccaagttcagaagtggttttcgtgatccaaaaccaatacttcggaagttttatgcgccacgcgctgtccggcttaataaggctatctatcagcaagccttaaatgaagttcagcattatttttctgatatatttcataatttacgaccttatcatttcaatgacagattatcagatttagctgaaccaacatcacccggtctcttttttaagaggaagggttttagaacaaaagccgaggtcttatcagatacaaaagctctacagcgcctgaggtatactgtccatagaatgaagtctggcatagagagggaggccgataaatatctaagtacagtggttgttgctgatgcaaagttcgatataaattcatgtaaaaccaaggcacgcgtggtctgggtttatcctcttgaaatttgtgcagcagagaatatgttctttgcggctattaaagataatttacctgatgactgggttccaaccccagctaaatatcattttagattttgcgggcggagttctggatctgccgactattcgaactttgactcaactgttccgaggaaggtcatatatgatgctttctcaattatgagatcatggttttcattctccacatatgtgggtggtgcaaaaccttattcaaccacatcacttgatcggttatggagctttttgagggaatatttcatcaatacacctcatatcctcccggacagtcccgaagtaataagacataagacgaacggggtaccgagtggcagcatgtttacaaacataattgacacaatatgtagtagattaataacaacatacctacatagagttaataagtgtcaagctaccatcacaacctatggtgatgatgtacacttccgagattgtgtatgccagccttctgaacttgagaccagggcaggcactgactttaatatgcggctcaaatatgagccaccgaatgaacatggatgcttgacatactgcaaagcagaatgtcaccaagcaaagccgtaccatgaaggtgcttggtatgttaatatccttaattgttgccagacgcgatataaaggagcgacgaccgaatgcctcatgtacactgaacctaccagaatgcagatgtcccaattgcgtgatatcgtggctgttcatcctccagaaaggacgaagtggtttgatcgctggcagaggaaattctttgaatactggcctaaattcaagaagaaggtgtcaggcctatag

SEQ ID NO: 1775 - DNA, 1410 bp, Vespula vulgaris Partiti-like virus 1
  source 1..1410: mol_type = other DNA
atgtactcattaccgagtaaacacggatttagtcagcgtcataataatgacccgactccgtctcctttcttgtcgtgtgaagagctaacacgattcagacgcagccctgttactttgcaattgattcgagatgaccttttgcggtatggtaacaatacgaaacgtccatcctgtagtatgttggatctagcaattacacacgctagaagagcttttcaactacctgaccctgagaagatgatccatttaaacgatatatttaatagaagtgatttaaacatttggaaatcatcacctggtctaccctggaaggatttaggatacgcaacaaagaatgacatccgcatggatcaacaagctataaatagtatacgtttgttttggcatcgtattaagtatggtaataagatcgaactaccagatagctgtgcatttgttcgtagtcacatcgtcgaatatggcgagtataaggttcgcgctgtttggggatacccagctactgttacctttggtgaggccgtatttgcattacctttaattgaggcctatcagaaatattcatcgcctattgcttatggttatgagaccgccgttggtggagcggcacgtataattcgtgaaagcaaaggaaaatatcactacgcgttggattttaagaattttgacaaactcgttccttcgtggttaataagaatagcttttgatattttaacccttaatttaaatttcgctgaatatcgcgattacggtgttgctgatgcgcgtagaagctactgtatgtatgaacgtatcatagactatttcataaacaccagaattaggctatgttcgggtgaacgctttattaagcgtagtggcgttgcaagtggtagctattttacccaattgattgatagtgttgtcaactatatattaatcatgtgggcgcatcttcgtctcacaggtaaaactcccaagtttgtaaaagttttcggagatgattcaatcttttcctccgatgaattatttaacttggttcacgcccaggaagtatttgatcttgttggcatgcacttgaatatgagcaaaagtgttgtctcccagaatatacatgagttaacctttcttggatatcaacttaatcatggatttccgtcaagaccgttcgataaatggttaactgctctcatgtttcccgaacaacgtgatcgagcttgggatgacgtcgcatctagagcattaggactgctttatgcttgtgctggttgcgactcaaagtttgattcgctttgtcgtatgatcatcaaccttaagccctatgacttatgtttaagtcgtggaatgatgcgaatgctgaccattatcggtgtgagagatgtttgtaaaacacctcccgatgtgtggactttctggaagcggttaggagtttag

SEQ ID NO: 1776 - DNA, 1611 bp, Vespula vulgaris Partiti-like virus 2
  source 1..1611: mol_type = other DNA
atgtcaatttcacttcaaacaaaaactaatgcccgctacaaaacttgcgacatagtctcttttgaatatgagcattttgatgaggatgtagttttcccattggttatccatggaagtgagctccctgatggtagtggttttccctacaagcttgagaggcctagtctatcattcaagacctatagagctatggctgaaaaggggctcaagaatgtggccgatagagttataactactaaatctcggtcacacataacgccggacaatatttggcaaggtgttttaaaatacgctggttctgttccaaagagatgtactgatccagtctatcagcggtgtctcgatgacctgagagccgaagttggctgtgagttgtctgttatggatatggatgaagcagttaaacatattcctgcttctacatcaccaggcctgccatttataaagacgcatcccggtaagaagaaaggggaaataatctcccagtttagagaaaaattttccggatattgggatagagttggaagaggaaagcctgttaccccactccccgattgtgctgccttcgctaggagccacgttggagcagccggaaacaacaaagtccgaccagtctgggcttatcctgttgaagctgtagttgaagaggcccgtttttccgttcccctccaaaacgcacttaaaaatcaagaaattggtcaccaatttgcttatggcatggaaatgttgaagggagggatgacctggttaaacacgaacctacagcgttcacgccgtcgagacccaggatccaagttcctgatgatcgattacacaggattcgataactccatacccgcttggttaattagagatgtatttgatattgtactatcattgtttcctcatgcgaccatcgaagacaaaagaagatttaaattcattgttaactatttcattaacacttcaattcaaaacatggatggccgccgcttccagaaatggcatggtgtgccttctggctccatgttcacaaatgctattgacacgatgattaattttgtcgttacaagatactgtatactaaaaacaactggagagatgccactgtttttcaactgctttggtgatgattctattgctagtatcgatgggcgttgtctcattgatcttgaacaatttgctgctgccgccttagtgtttggaatggtggttaatacaaagaaaagttactggacaaatgtaatcactaatgttcactatcttggctactacaacctacatggtgatcccgtcaagcccgacgatgaactagtagcatcaatgctgtttccacagtacctcaaagatgactgggcgtattgcatcgcaaggtctttgggctgtttacttgcatcttgtggaaatagtccaaacgtattcctcgctgctcaaggtgtttactggaaagctcatcgcgagaagtcagttaatgttgaagaaggactccgtttaattcgcacaaatccacgtatgctgcgtcatttagcaaatatgggtgcagctgagttcgatctttcacctgaattctttttccgtaacgattatagctatccccggctagattgtacgaagatcatgaagagaatctaa

SEQ ID NO: 1777 - DNA, 1731 bp, Vicia faba partitivirus 1
  source 1..1731: mol_type = other DNA
atgaagaatatcactgtcattggtaatttgccgaatttagccaaacctatttatggtggctcaactgcagatacaaacccagcttacgctgagacagtcgatcacgcgctttacaaattcctctcacctgaggaagctgagttagttatcaatggttatcgccgttccccctggaatgatgaagccttaaaagatgacattgctaagcttgattctccttacttccaagtaacgaaggatgagcactattacaaagcaatagctcatgtcaagaagttatttactcctgacaccccactaaagcctgtccacttcgctgacctccgccactacccctggcaattatccagtaatattggagctccttttgcaactagccctgaatggcaagattacattaacaagaagtttctcaccggccaaacagccgaaaattaccgcgatctattcaaagaggcccatcacaccgatctctatcctaaaatgttagacagacgtatgacaaagcgaaatctctacaacgagatgtttctcatcaatcgaaagagcattcacattatcaaaaacggtcgtactactaacgatcatggtcatgacttgaaatattggaacaccgccttcgctagacaacacttagttgaagatgatgaccccgacaaagtcagacttgtttttggtgccccctccacccttttgatggctgaacttatgttcatctggccattacaagtgagcttactagctcgaggtccacaatccccaatgctatggggttatgagacactaactggaggctggtcycgccttttctcatgggcatctgacaccatgccaagatacagcacagtcctaacacttgactggagccgttttgacaaagatgcacgccacacagtcattcgtgatatacacgctatgatcatgcgccccatgtttaccttcacagaaggctaccaccccacaatctcttatcctaacgcacctgacactaaccccgataggttagagaatttatggaattggatgacggacgccattttaaccgtycctctcatgctccctgacgggcagctactacaattcaaccattctggtatttactctggatatttccagactcagattttagattcaatttacaattgtgtaatgatttacaccattctctcaagaatgggtttcgacctagataaattttgtattaaagtacaaggtgatgattcacttatgatatcaccctacaactacactttactagaaccaagtttcctcaaaacttttggcgattacgccaaagaatactttggatctacactcaacttaaagaagagtgagattctaccctccttagacggagcggaagtacttaaataccgcaaccacggtaccatgcctcaaagagaagagattcagttactggcaatgcttagacatccagaacgaaccgcttcactaccatcattgatggctcgatgcatcggagttacttatgctaattgtggaaattttaaccgtgtttcccgcatttgcgaggatatctacaagtttttacaagctggtggattcacccctgatccctttggtttacccggaggcctacgatacagacaaaattatataccgagctacgtccccatcgacctatctcacttccctacttattttgaaaatgttgaacacttacaggaccctcacaaacccatactctcggaaaaacactggcccaactaa

SEQ ID NO: 1778 - DNA, 1437 bp, Vitis cryptic virus
  source 1..1437: mol_type = other DNA
atgcagagcacattaagcgggtatgtttattcaaattttcaagcagatcttgaaaagacgaatattaaacatcctcacttagttaggcgggagcctaacacgacatatagagatgagtatgcattaagcgaactcatgactattagtccagagctatacagccaaatacttgaaggttggtcgagaagttactatactcgagataagcaccttgaagctattctggcctacagccatccaaatatccactcatcttcagttgatgcgcgtgtctattggcaagcaatcgatgaagtaaagaaaggattaaatagccttccactcgtgagggcctacgatattttgtctgaactagacaaggtttcatttaagtcgtcctcagcggcgggctatgattatattggtgcgaaaggaccgtacgatggcgaaaaccattcacgtgcgatcaaacgagccaaagcaatattgtggtctgttgtcgaagacaacatccaaggcatgactcatgccattgaaaccgcagtacctgacgtaggctacacacgcacacaattagcagatttgtctgaaaagacgaaagtaagaagcgtatggggcagagcgttccattacatactcttggaaggagttgtagcagacccactactacaagcattttcaagcagtgatactttctatcacatcggacttgatccgctagacagtgtaccagcactattatctaaggttgcacaaagcagcaaatggatttatgcattggattggaaacaattcgacgctaccgttagcagattcgagatcaactcagcatttgacataattaaatctaaagtttcattccccaataaagaaacggagacagcatttgaaatttcgagacaattattcattcacaagaagatcgcagcaccggacggatatatttattggtcacacaaaggaataccatctggcagttatttcacatcagttgttggttcaatcatcaacaagttacgaattaactacctctggctgacattgacaggtcatcttccgaaacattgctttacccaaggcgacgattcattagttggagacgacatcttgttacatccagataagattggagaagttgcaaaccgcattggttggtacttcaatccagagaagacggaatattcaacagtacctgaattggtatctttcttaggaaggacatatcaaggaggtttcaatactaggaatcttactaaatgtattagattacttgtatttcctgaatatcctgtaacatccggaaacatttccgcctatagggctaaatctatagcagaggacgctggtcatctcagcgacatcctcaataggatagcactaaagttagagcgtcattacggaatcgcttctgacgaagaagttccgcactactttaaacgttatatacatggtatgtaa

SEQ ID NO: 1779 - DNA, 1419 bp, Whatley partiti-like virus
  source 1..1419: mol_type = other DNA
atgttacaagacagaggccccttcagacgtgcagccctaaaaagctacatctcccagatgtcgagacccaatcccaagggtatattcgatggttttgtggctgagattctggatcaacagggattcgtatgggaggaagaccccagatctatttatgatcctcagcaattgtataccgccttagagaggtatgcgacagaatggcaacagttcgaagaactggatgatgcactcacttttgggtttagaaaggcttttaaaatatttgctaagcctaaggatgaaaagccacttcgtccgtatgaagatgaggaagtcattaatgaagctctgaaactggagaagtcaagcggtttaccgttaatgacaacgaaggaaaagagcttggtgtatagtttcgacagagaatcacagattcgaagtggaatgaaagcaccaaatccttgcgttgcttataagcgaacgcagcgaggcaataagacccgacttgtttgggggtatcctcttgagatgacgatcatggaagcaaggtttgctcgacctctcatcgaaagatttagacagatggctactccaatggctttctgtatgtctaagatggaattaggcgctaagctagctcgttattttgaggaacaacctggaactacggtgtgcttggactattccaagtatgacacgtcaatttctaggactatgatttatcaagcctttagaattttaagaacgtggttttctgacgaggacactaaggaactaggatgggacactgttgtgaagtatttcgtattcacgcctattgttatgccgaatggtcatctgtatacgggcaagaatcatggagtaccgagtggcagttatttcactcagatgattgactcgattgtgaatgtagcattggtatacgctttaaagtatgcatgcgggctaaagtttgaggacagaagcttatacgttctcggagatgatgtcatcgttcaagttaggactaaagtcgagcttaagaaatgggctacatggttggcaaaacatggcattacgttgcatgacgatgcgaaaactgtcgtaggcgaagttcatttcttaggggcattctggactaagggaaagcctgacgctccgatagacgagttagtgaataaagcatgttttccggaggcatttagagtctaccaagattcgccttcagtgggtgctgaaaatgtgttgcgaagctacgcttctagctacaagtcggcatggcggtttcttccattggtgcggcctgatatgagactaatagacttaccgacccaggatgactatttggccaagtacatgtctggcagcgatcgatacttattcgaggagaataggatggcatatcgaaaatcgcactcaatgatccgtccagcgctctgtatcaggtaccttctctga

SEQ ID NO: 1780 - DNA, 1851 bp, White campion partitivirus
  source 1..1851: mol_type = other DNA
atggattacctcacatccgcattcgaacgaattacacattggttcgtcaaacccactaacctcgaatacatcgggaactactctacacctcccagtattgttcgcgtaaatgaagttgcaatcgcaaatcataagaaaaccttggaacacgctttcaggaagtatctgtacgcacatgaactccaactaatcatggaagattaccgtcgatcagacatagatcaagaatctattcttgccgactttttctctggtgatgttgaacatttcgagataccttttgatgaacacattgaagtcgggcttcgctgtatggctgacgccttccgccctcccagactttgccgccctgttcacatcttagatgtcaaacacggatacccttacaaatggaatgtcaacgcagaacctccgttctcgactgacccttacttcctcgaccaacgtaagacctttggcgaattcatctcaatgcacgaatatgaacacatcgataaagctgacttcttcagaagacatcccaacatcgaatcacatgatctactccaaaccgttgtccctccgaaattcggatacctcaaatcaatggttttctcctggactagaagatggcaccacgtcatcaaaactggattcaaagacctaacaaacctaggccctagcggatacatctacaaccgctttatctttcccatgctcctccacaccaaaactgcaattgttaaacgtgacgatcccaacaagatgcgcaccatatggggcgctccaaaaccttggatcatcgctgaaacaatgttgtattgggaatatatagcctggatcaaattaaaccctggcaagactccaatgttatggggtttcgaaaccttcacaggtggatggatacgcttaaacaaccaattgttttgcggactcatcaagaaatctttcctaacactagattggtcccgcttcgacaagcgcgcctatttcagtcttctcagacggatcctatacaccgctaaaaccttcctcacatttgaagaaggatacgtcccaacacatgcagcaccgtaccacccaaagtggaaccacgacaagacgctcaaaattgaacgtctatggctctggacccttgaaaaccttttcgaggctccgatcatcttaccagatggacggatgtacagacgtcacttcgctggtatcccatccggactgtttattacacagttgctggattcatggtacaactacactatgctcgctactctcttgagtgcacttggcttcgatcccaaacagtgcattattaaagttcaaggcgatgattcaatcatcagattgactactctcatcccgcctgaacgccatcaacatcttatggaccgcctggtccaacttgctgaatactattttaatgccttgataaatatcaagaaatctgagatctccaactcacttaatggctgcgaagtactctcataccgtaatcacaatggcttaccccaccgtgatgaaatcgttatgctcgctcaattctaccacacgaaagcgagagaccctacacctgaaattacaatggcccaagctataggtttcgcctatgctagctgcggtaataacaaacgtgtattatgggtactccaaaacatatatgactactacaagagtctcggattcacgcctaaccgcgccgggttgaccctcaccttcggtgattcacctgacgttttcatgcctgaaatcccacttgatcattttcccaagttatcagaaattcggaactatctcacatgttctgaatatcggaacgaagcacaagacgctagaacttggccaaggacgttgtttatcaacgcacctgccgagtaa

SEQ ID NO: 1781 - DNA, 1528 bp, Xanthi partiti-like virus
  source 1..1528: mol_type = other DNA
atgtcgaaaaatcgcaagcaagcgttcgttagattacctgacgatttagggttccccttcagcttgctacccgcccgtaaggacgaatgggctgaagaggtgtgctcacgtcattttggcgaaatccctatttctaaggtattaggtgagttgcataggagtaccataagctatgacgccatgctccaagatctgatggcttatgaccgcgagccacaaatatgcaatcgtgacgatgtatattttgctgttctcaactcattgaggaaggatctggagcattttcctaccattgtcccgttgacaatgggcgctgtaccgcaaaggcctgatttccctggtcagaagtctccgggtttaccttacaaacttcttggttactctacaaaacaggaggtcattgatgccgggttattgcatgagattaacaaagactggcaaaatatagggttcaagaagcgtaaagtggagttgcctgatgtgtgcctatttgcacgagcacagatagcgcgaagaggtagagagaagatccgagcaacatgggatgatcccctagatgtctatttgacagaagctcaaactttctatcctattctcgaagtacttaaaaacaaacctaacagccaacaatcgctttatggcgtagagattggcacaggtggaatgaattcacgtcaacgagatgctgggaggaatccagacagccagtacctatgcgttgactggaagcagttcgataagaccgtgccaccttggatcatcagggatgcattctcacttctagctgagaagatagattgggcacacgttcaagatgtggaggataagatctggccagttgctcctgaaccttccaagcgtcgctggaagcgtatggtcgattatttcatcaatactccaattcgaacgtgtaagggagagaggtttttagtgtcgcagggcgtgccaagtggctcttgcttcacgaatctgattgatagccttattaacgcactggtgatgaggtacctcatctactccatgacaggtagtctaccattcgacgagatgtatctaggagatgacggtgttgttgtggttaatggcatagttaatcttgaggatatggccactgttagttttgagaaatttggagctatcctaaacgtcgagaaaagttatgtcacnnnnnnnnnnnnnnnnnnnnnnnnnnnnnnnnnnnnnnnnnnnnnnnnnnnntccttcaagaatcaggattttctaattgcttcttttgtgcaaccggaacacaccagaaaggacgccctagatgcatgcgctgcaggacttggtcaactgtggagtggattcgatgctgtttatgctggagtttggcatcgtgtgattcttgaccttgctgctaaggatggattgagtagagacgaagtggtgacacgtctcaggtccacagcacaccggcataaatatctcatgcacatcggtttaaatcctaaaactctcagtttgcctgcccctaacgagaatgggttagttctcgacgtccaaccag

SEQ ID NO: 1782 - DNA, 1830 bp, Xiaogan partiti-like virus 1
  source 1..1830: mol_type = other DNA
atgaacaacattgaatatcttaaaacgcttccagggaactactccctaaaccgttttcgtggcgacctgtccgaactcgctcagtcgagattcgaaagagtctaccgatacgctctactcttctatcaaaaggaagaagttgatcgtgcagcatcaaaccgtcgttcaaagactacagatgaagcagttattgctgatttcatgacatttgaacaaccaccgcaccctataccaagagatgtgcattttgaatctgctattcgtagaactcgtgaactatttcacccaggacgtacactgtatccagtttcctacccagatctacgttattacccgtggaatctgcgacctaatgctgaagcaccttggaacctcccagactttagatttacaccaactttccgtaatctagacaaagagtcggagtcaccaaagcttaaagagcatattgagaaactatcgtactatatttctgagcggaaaatcaaagtttttgattatctgagaaataagcacgcgtttggactgattgataatacttatcactcatttcataacctatacaatgagatatttcaatataaccgttatcaaatccatgcaattaaggatggcctccatcccttttgggataaacaaggaaatccagttccgtactattggaacacactacacgcaagatcacatgtggtggcagctgatgaaccagacaaaattcgagccgttttcggagcaacaaagttgttacttatggcagaaaatatgttcatttggcctttacaagctacctatctaaatgatgattctgtgggaagattgctatggggaagagaaacgatccgtggcggatggagaaaactattctcggaaattcacaaagatggaaaaccaaattcttttttatcactagactggtcacaattcgacaagcggcttttgttcgaattaattgacgaagtccacacaatttggagatcctatttcagtttcgaggcttatcaaggaactactttctacccaaacgctagcacagaacctgtcagaatcgagagactatggagatggatgtgtaattcaattaaacacacaccaatcctgcttccaaatggaagcctttatcgatggacaaggaatggctttggatctggatatcaacagacccaacttatggattcgttcgcaaacatgattatgattttaacgtgcttgtcggcacttggcgtcaacattgattcagaaagcttctggatcagaattcaaggtgatgattcgctcatcgctctttatgaaaacatttttgctatttatggaccaagctttttacaaatgcttgccaatgcagcagaatactactttaacgctaagttaagcacaaagaaatctcagttctcagatgaactgaataacatgtccgtcttaggatactttaactattacggtttgccttatcgtacagatgaggacttactaagacacctaatgtttccagaaacaccaggaccacaagagcagctcctcgcagcagcaattggactggcctactcagcctgtggatgctcaatcgcatttcacaacctctgtgaacacattcaaaagagactagagagcaaggggaggacccctgaccctcgtagtcttgactggatgatcagagctagaatacttgatgaagatgaagttagagagatgatctcgaaccctatcccatcgaggcttactcttattgcaagagtctggctatcaactgatcgtacccgggtacagaaagagagactatggcctactgaaccaggaccgagagaaagattcttcttcctcccaatggtttga

SEQ ID NO: 1783 - DNA, 1236 bp, Yarrowia partitivirus A
  source 1..1236: mol_type = other DNA
atggaaagcgaatctgaaaccgaagtcttggctgaagagctgtcgatcgttgctctcattggcgaaacacgtgttcctgaacccattgaacaacaaagaggttctcgaactctggctcaagtgcagtctgaccggtatgaggagctcaacatcccttgggactctgaaattgtcagtctgagaccttctgacgttcagagatcctctccttggtacattacgcctaccaagtctctgagatccaaggggtttcttgaatcctacgagtacaatggagaatgtgagactcgttgccactcaattcttcagtttgacaaatggagaaacgctcgtagaaacacctacaggacttgtttgtcaaaccatacggaagctcatgaactcgtcaacctggaattggtcgaattgatcgactcctctgtcgtcatgtctggaaagggtaaatttcctttgattttaagcgagttggatacctctggatccccaggtttgccttttatcagaagatcaagttcgattcctgatcaagaagctgatatcattcaggctacaagaacttttcatgcttttacaaaagctagatggtctccaactggagtcagagctcctccttgtgatatcagagaacgagaacggtctctatggagctaccctcttatggttactcttcttgaaaaacgattcagtacctctttgaacgaaaagctccaggaattcaactatcccatgttccgtgatatctcagatcgaagaactatcatcaggatgctgtttcaaggtcctgctacaagcgatgtccttctagaggttaaactcaactacttttactccagcgtctcttccgatgtcattgaaacagtgtttgaaatgattgaatcctggtctctccatgtgaaagagacttccaagaaaacctggagttttgtgaaacattacttcatccagactcccatcttacttcccaatggacagctggttaagaagtactctggtattagttatggttcagagtatactcgaattgtaggcactctggtcgccaatattctagccattgttctcctctccagccaaggcattccagccaaattcttccagacaaaaatccactactcgtccaaaagagagaccattttcttgagggtgccaaagtcgttttcaaaagagactatggtttccgacgctaagagatacggctttaatttaagggtgtcggagatttccctgcagaattga

SEQ ID NO: 1784 - DNA, 80 bp, Alphapartitivirus sp.
  source 1..80: mol_type = other DNA
cgaacagaaactcctacgtctcttccctcaaactttaaaggaaattcttctgctcttggaacagatattactaacccaca

SEQ ID NO: 1785 - DNA, 93 bp, Beet cryptic virus 1
  source 1..93: mol_type = other DNA
gatcaaaagagtaacagctcttgcccatatttttcaagatcaaaatagaaattgaatcttagctgctctacctcaacttgttacctactctaa

SEQ ID NO: 1786 - DNA, 100 bp, Bondarzewia berkeleyi partitivirus 1
  source 1..100: mol_type = other DNA
agaaaaagcactgcagaccccatctgtactcttttaatcttttcgagatcgaatctcgcctgcaaatcacgcacaaacataaccactcacactgtccacg

SEQ ID NO: 1787 - DNA, 94 bp, Carrot cryptic virus
  source 1..94: mol_type = other DNA
gatcaaaagatcaacagctacttccaaacgctttttgcaatcaaaatagaacgcgaatctcagctgctctaactcaacttgttacttactctaa

SEQ ID NO: 1788 - DNA, 89 bp, Cherry chlorotic rusty spot associated partitivirus
  source 1..89: mol_type = other DNA
gaattatctgagaaacaaagctccacaattctctgcctccaacaataaagcagatttctttgctcttctaacagctattacttaccaca

SEQ ID NO: 1789 - DNA, 44 bp, Chondrostereum purpureum cryptic virus 1
  source 1..44: mol_type = other DNA
aaattaactctacgattaaccctcgtatcctttataacttcaac

SEQ ID NO: 1790 - DNA, 116 bp, Enontekio alphapartitivirus 1
  source 1..116: mol_type = other DNA
gtgttgggtgtgtttgggggttttttttgaaggtatatgaattttttattgaaactctaatgagttcttggtgttaaaaattgatgccaacttattcgctttcggcgaacagggtc

SEQ ID NO: 1791 - DNA, 243 bp, Enontekio alphapartitivirus 2
  source 1..243: mol_type = other DNA
gaagggttctttcaccatcgtaagctcatcacgtagtcagaatccagattatagtttattccgtttttacttaaccctccggaaattgaggcactacccccagaaactcacatgtaaataagctttacatgctagaaattaactaactaagggtcccaaagtacatcttgagaggcaaaggtcgcgtagaactttaaaactagataataaaaacaaaatgaataaatggagtcaaatttcatt

SEQ ID NO: 1792 - DNA, 257 bp, Hanko alphapartitivirus 1
  source 1..257: mol_type = other DNA
aggtgtcgttttttttacacatgaaacccataggtaaacatgtttccaaaaaccattatttgattcttcgaccatttaatacaccaggtctctcgccttacggccccgaataatcctctaaatagtggcataacgcgtacaagggtgttttaacctccgtcctaagtccttcggtcttttaagggaccttcacaaattcgtgaagaaaaaatcacgcaggtactcgtctttcgataaagtatatgtagtgtgggaca

SEQ ID NO: 1793 - DNA, 85 bp, Hanko alphapartitivirus 2
  source 1..85: mol_type = other DNA
gtgttgggtgtgtttggttttttttttttttttttttaattgagttttcgaataattacataagaaactgacgtcagtcagagga

SEQ ID NO: 1794 - DNA, 109 bp, Hanko alphapartitivirus 3
  source 1..109: mol_type = other DNA
gtgttgggtgtgtttggtgggtgtttgttttatctataacttttattacgctttttgttcgcttttttcaaattttagataaaacaaacactcctaccctttccccaac

SEQ ID NO: 1795 - DNA, 86 bp, Helicobasidium mompa partitivirus V70
  source 1..86: mol_type = other DNA
agaaaaggactacagagccctccgcttctatccacgtccccctaagattttcttaccgcaaatttctactcttcctccctatcacg

SEQ ID NO: 1796 - DNA, 107 bp, Helicobasidium mompa partitivirus V70
  source 1..107: mol_type = other DNA
acaaaactttcagaggacccccctcagatttgttctgtttctcttttgccgccttttcgagcctcaccgaaaactcgctactactaacacccaccccctgacacaca

SEQ ID NO: 1797 - DNA, 97 bp, Heterobasidion partitivirus 1
  source 1..97: mol_type = other DNA
ggatcacccgacagaacagtcaacacaagactttgagccctgaaaattaaagctcactcgctgctctctgcatcacatccactacacaccactcacc

SEQ ID NO: 1798 - DNA, 72 bp, Heterobasidion partitivirus 12
  source 1..72: mol_type = other DNA
agaagaaaactttgagactctctcactgccttttctatatctctaggaatcattctccctcatcacatcacg

SEQ ID NO: 1799 - DNA, 78 bp, Heterobasidion partitivirus 13
  source 1..78: mol_type = other DNA
agaaaaggccccctggctctcaccaagctcctttaaatctccaagactgaaactctctgttcatatcacgaacaaaac

SEQ ID NO: 1800 - DNA, 78 bp, Heterobasidion partitivirus 15
  source 1..78: mol_type = other DNA
agaaaagcccccagatctcactgatccgctgctttaatctaaacggaacccacccgctctgaaaatcactcagaaaac

SEQ ID NO: 1801 - DNA, 81 bp, Heterobasidion partitivirus 20
  source 1..81: mol_type = other DNA
gtcgaacgttctagaaaccctagttacagacaataatacgttctcgtctcagaattcagattctctaccctctcactcaac

SEQ ID NO: 1802 - DNA, 69 bp, Heterobasidion partitivirus 3
  source 1..69: mol_type = other DNA
agaagaagccctacttgaacaaagcactcttctatatctcaaagtcttacaaactctcatcaaatcacg

SEQ ID NO: 1803 - DNA, 99 bp, Hygrophorus penarioides partitivirus 1
  source 1..99: mol_type = other DNA
agaaatattaatctgaaatcttttcagttcaacgaaaaatatttcttttcagagcatactgaacgagcgtaacagcaacattaacaaacaacaacaaca

SEQ ID NO: 1804 - DNA, 239 bp, Kuusamo alphapartitivirus
  source 1..239: mol_type = other DNA
gttaaatcctctagtttcttttacgtatttcgaacacaaaagaaactagaggatttaacatcccacgaaataacaccaaacctgaacaattcgcattgaccgctataacagatattttaggcgcaaataaagcccaagaaatagttactggttataaaagaggtcttgtaagtaacgaaagtttaatttctgatttattacgtaacgattcacatggagttccacactgcacagatcaa

SEQ ID NO: 1805 - DNA, 70 bp, Medicago sativa alphapartitivirus 1
  source 1..70: mol_type = other DNA
acatgggaaatctaaagaattttagtctttgcagaattactctacatatacacacacacacaaacacaca

SEQ ID NO: 1806 - DNA, 84 bp, Medicago sativa alphapartitivirus 2
  source 1..84: mol_type = other DNA
cgagagtttacagaagcttccggtttataaattaaagatttttagtcacagcagatctcaatctactttcacacacacaccacc

SEQ ID NO: 1807 - DNA, 211 bp, Palkane alphapartitivirus 1
  source 1..211: mol_type = other DNA
gggtgttgggtgtgtttggtccaggtttaataccccccagaataatactaaacctgaacagatagcaacgaccgctatagcagaaatattgggtgcaaataaagctcaagaaatcatttctacctataaaagaggccttgttacaaacgaaagtttaattcacgatttattccgtaacaattcaaaaggagtcaaacaatgtaatcatcct

SEQ ID NO: 1808 - DNA, 185 bp, Palkane alphapartitivirus 2
  source 1..185: mol_type = other DNA
ttaatatcccaaagaataatactaaacctgaatcaatcgcaactaccactatagccgagatactaggctcaaataaagccctagaaattatctcaagttacaaaagaggtattgttacaaacgaaagtttaatatctgatctatatcgtaacaattcaactggagtccctcaatgtcaacatcct

SEQ ID NO: 1809 - DNA, 86 bp, Paris alphapartitivirus
  source 1..86: mol_type = other DNA
caaagagtccataaaactattgactcggttttataaaagtaaaaatttttagtcccagcagaatttaatctactctacacaacaac

SEQ ID NO: 1810 - DNA, 97 bp, Pear alphapartitivirus
  source 1..97: mol_type = other DNA
gtcaaatttatccgaattttgatattccttcactttcggttttataaaactaatcaaattttagccccaatagaattattctgttaccaaacacaca

SEQ ID NO: 1811 - DNA, 72 bp, Rhizoctonia solani partitivirus SM03
  source 1..72: mol_type = other DNA
ccctcttactcgtttatatctccgcgtcaacatcttcccgcaattcaaatcacgaattaaatctttctcact

SEQ ID NO: 1812 - DNA, 83 bp, Rosellinia necatrix partitivirus 2
  source 1..83: mol_type = other DNA
agataagttctttgaaccgtctaacccacgctcttcaaagtttcaacccttcaaaacttcgcactcacagaaccttactgacg

SEQ ID NO: 1813 - DNA, 102 bp, Sclerotinia sclerotiorum alphapartitivirus 1
  source 1..102: mol_type = other DNA
gtcaaatctttcggatccctcgacactccgttctatacaactaaaagatttttgtcacagaagcaacgctcctctcctatactcacacacacacacacaatc

SEQ ID NO: 1814 - DNA, 83 bp, Trichoderma gamsii alphapartitivirus 1
  source 1..83: mol_type = other DNA
gaaacaaaactattccgttctatacaattaaaagatttttgtcacagcagtttttactactctattacacacactactcaatc

SEQ ID NO: 1815 - DNA, 95 bp, Tulasnella partitivirus 1
  source 1..95: mol_type = other DNA
gctctctgagaccatctcagtcctcaccctaaagcttaaacactctagaagtattacactcctcaaacttgcatcttaaccacagccctgcaatc

SEQ ID NO: 1816 - DNA, 60 bp, Tulasnella partitivirus 2
  source 1..60: mol_type = other DNA
cgaaagatcatcttcgctgaatttgaacagtgcgacaaatctaaacaatctacttttact

SEQ ID NO: 1817 - DNA, 85 bp, Tulasnella partitivirus 3
  source 1..85: mol_type = other DNA
tcctgaacgagcttcaccaaagcttagatccctcaatacaaagacttctcgctcgcaatcagaacagtttgtacctcgtcctaca

SEQ ID NO: 1818 - DNA, 92 bp, Vicia cryptic virus
  source 1..92: mol_type = other DNA
gatcaaaagagtaacagctcttgccacgcttttcgcaatcaaaatagaacacgaatctcagctgctctacctcaactttttacttactctac

SEQ ID NO: 1819 - DNA, 74 bp, White clover cryptic virus 1
  source 1..74: mol_type = other DNA
cttgtacacactttttgcaatcaaaatagaacgcaaatcttgactgctctacctcaacttaatacctactctac

SEQ ID NO: 1820 - DNA, 91 bp, Betapartitivirus sp.
  source 1..91: mol_type = other DNA
aatattcggtatagaccttctctttataccacaagaaccctttaaaactcttttaggtcttatacgcccgataattccccacatcgcaaca

SEQ ID NO: 1821 - DNA, 108 bp, Cannabis cryptic virus
  source 1..108: mol_type = other DNA
gattttttataagcgccccccgccttatttaactaagaattaacattcgtctaagttatcaagccttcacaaagcctctgctctaattattcaccacaacgtctcacc

SEQ ID NO: 1822 - DNA, 52 bp, Ceratocystis resinifera virus 1
  source 1..52: mol_type = other DNA
agacattctattgtaccgtaacgttctaattagaataaatcaccttaacaat

SEQ ID NO: 1823 - DNA, 108 bp, Crimson clover cryptic virus 2
  source 1..108: mol_type = other DNA
agatttatttaaagccgccccgtgctctgaatattaagaattcacattcgtctaacctctaaatctgaaaattactctcaactaattttcacattctaacgtctcaca

SEQ ID NO: 1824 - DNA, 102 bp, Dill cryptic virus 2
  source 1..102: mol_type = other DNA
agattttattaaagcgcccacctttaatatttgagaattcacattcgtctaaattaacaagctctcacaaagcctctgctctaattattacaacgtctcaca

SEQ ID NO: 1825 - DNA, 90 bp, Enontekio betapartitivirus 1
  source 1..90: mol_type = other DNA
tttttttttattttttttgtgtttttgatttttgtataaaaattctaagtccgtggacttgaataaaactgtcggattaaaagcaacctg

SEQ ID NO: 1826 - DNA, 59 bp, Erysiphe necator associated betapartitivirus 1
  source 1..59: mol_type = other DNA
cccccgtctactcgaaaatacttttatgtattccccaattccactctctccagcataca

SEQ ID NO: 1827 - DNA, 71 bp, Erysiphe necator associated betapartitivirus 2
  source 1..71: mol_type = other DNA
gaacgcctcaccgcctctcaaagattcacagaataatttattctaaatattactcttcactcctgtctaaa

SEQ ID NO: 1828 - DNA, 81 bp, Heterobasidion partitivirus 17
  source 1..81: mol_type = other DNA
gaatcactcgattcaacttgaacagaacgaactggccctgaaaattaaagccactctcaagctctgaaaatcgaatttacc

SEQ ID NO: 1829 - DNA, 64 bp, Heterobasidion partitivirus 2
  source 1..64: mol_type = other DNA
gaacaaggctcatacgttaaccctacaagttcacgcaatcctatcgttttccctgaccctcagc

SEQ ID NO: 1830 - DNA, 63 bp, Heterobasidion partitivirus 7
  source 1..63: mol_type = other DNA
gaataagccaccccgcaagaacttacaatcctcgctagagcttcatatcttcctacccaccca

SEQ ID NO: 1831 - DNA, 76 bp, Heterobasidion partitivirus 8
  source 1..76: mol_type = other DNA
gaagttttgcatagcacgccttcacaagcactcgcaaattcacagcacctttttaggtcctactcttctctccaag

SEQ ID NO: 1832 - DNA, 54 bp, Heterobasidion partitivirus P
  source 1..54: mol_type = other DNA
aacaaagctacacgcaaacagcaactgctaaccgcgcgccttatcgttttctct

SEQ ID NO: 1833 - DNA, 109 bp, Hop trefoil cryptic virus 2; identical to SEQ ID NO: 702
  source 1..109: mol_type = other DNA

SEQ ID NO: 1834 - DNA, 37 bp, Kalajoki betapartitivirus
  source 1..37: mol_type = other DNA
gtcttataccgaatttgaattatctacccttaccact

SEQ ID NO: 1835 - DNA, 75 bp, Lentinula edodes partitivirus 1
  source 1..75: mol_type = other DNA
gaacatctgtccacacgccccaccccgtgcccaagatttcattagttttaaatactttaaatttcaacaactaga

SEQ ID NO: 1836 - DNA, 97 bp, Quinoa-associated betapartitivirus 1
  source 1..97: mol_type = other DNA
gggagatttttcataaccgcccccccggttctgaaaatagacttcacagtcgtctacaataacaagtcctaagaaaacccctgctctatttattaca

SEQ ID NO: 1837 - DNA, 95 bp, Quinoa-associated betapartitivirus 2
  source 1..95: mol_type = other DNA
cggccccccccgttataaaatttagaattcacattcgtccaaaatatcaagcaaacccgcctctgctctatttttctcctcccttacgtcccaca

SEQ ID NO: 1838 - DNA, 106 bp, Red clover cryptic virus 2
  source 1..106: mol_type = other DNA
agatttatttaaagcggcccccgccctaatatttagaattcacattcgtctactaattttcctacaaaataactgctcacccttttatttttactaacgtctaacc

SEQ ID NO: 1839 - DNA, 79 bp, Rosellinia necatrix partitivirus 6
  source 1..79: mol_type = other DNA
agttttgttcacaaggcccccgcgcaactctgaacactttatcgcttaacaaacgaaactatcctgccccaacaacaca

SEQ ID NO: 1840 - DNA, 75 bp, Rosellinia necatrix virus 1
  source 1..75: mol_type = other DNA
agaattcgttctaggccccccctgtctacacgaaagcaacccgctccaaccttctaatttcctctcgcatacaaa

SEQ ID NO: 1841 - DNA, 108 bp, White clover cryptic virus 2
  source 1..108: mol_type = other DNA
agatttatttaagacggccccccccgttctaatatttagaattcacattcgtctatccatccctttaaaataacagctcaccctcttattttctactaacgtccaacc

SEQ ID NO: 1842 - DNA, 99 bp, Beet cryptic virus 2
  source 1..99: mol_type = other DNA
agaattataccctagctttctagaaagacgggagtcatagtgaaagcgctagggtaagatttactactaattttattcgtcctacgtgttacttcaaac

SEQ ID NO: 1843 - DNA, 101 bp, Beet cryptic virus 3
  source 1..101: mol_type = other DNA
agaatttaaccaaaaccccatattgaggacgctgatttcattagcgccccgatatagttttacggtgaaatttataaatttagatttcaagtacgcactac

SEQ ID NO: 1844 - DNA, 98 bp, Brassica campestris chinensis cryptic virus 1
  source 1..98: mol_type = other DNA
agaattttcaccaactaaataaacattttagacccgggcacgcctcgggccttagttggtgggaaattaattaataattttcttagctactatccgct

SEQ ID NO: 1845 - DNA, 177 bp, Camellia oleifera cryptic virus 1
  source 1..177: mol_type = other DNA
gataatgatccacaataggggatttccattatcattggattagaatcaattagagttataatgatgagttatagatctcgagtcgtgttctaaccagacttgtataatgcaggtgagtagaaaagattttcaggttacaacgtagctgttattttctggttacccgcgtatagcaag

SEQ ID NO: 1846 - DNA, 178 bp, Cinnamomum chago deltapartitivirus 1
  source 1..178: mol_type = other DNA
ttcattggtaaactcgaggaactcatattctctaatgttgcgtaacatctttgcgacgttagcgctgtgtaaatagaattttccaacaacccccacagttagttttggaaattcaaatttgaattacaacacaaggggtgaaggataattatatttacacagcgctaacgtcgcaaag

SEQ ID NO: 1847 - DNA, 105 bp, Cinnamomum chago deltapartitivirus 2
  source 1..105: mol_type = other DNA
cgaacactccagtttggtcccaacaaccacccgttgggccgccaaaggagctgtctggataaattatattcacacacccatctcgttacaaataattaaacgacg

SEQ ID NO: 1848 - DNA, 131 bp, Conifer deltapartitivirus
  source 1..131: mol_type = other DNA
aaggaacatttatcgaaattttgttagtaggaattttactgaactttcaacgaaagtatggaaaacagtgaacccactaacttaacttgtgtcgtacaggtgcttatttggagctttaaagaccaaccagg

SEQ ID NO: 1849 - DNA, 142 bp, Fig cryptic virus
  source 1..142: mol_type = other DNA
ggattgtccggcaggaaatctacgcacagtgtgtgtcaagggctagatcattactttgggagctcagagaaagagttagatcaaaacagtccgcaacagaacattgtacgcgatccgccaaataatccgggtaggttttaac

SEQ ID NO: 1850 - DNA, 85 bp, Ilomantsi deltapartitivirus
  source 1..85: mol_type = other DNA
tctttcggacccaggtgttaagctgttatggaagtctaaagagactgttggtgtgtaccgcttttcggtgtggtgaacgtcaaag

SEQ ID NO: 1851 - DNA, 126 bp, Inari deltapartitivirus
  source 1..126: mol_type = other DNA
gtgttgggtgtgtttggtcctgctaggacccaattaaggtggtcttaagatggattaatgtaggtggatggtgaagcgaacataacttgtcaacgcggctaatgatgttgttgatgatagtggttc

SEQ ID NO: 1852 - DNA, 168 bp, Japanese plum-yew deltapartitivirus
  source 1..168: mol_type = other DNA
cttaagggtcattattgtaagttaggttaggaaaacctctaggaaaactttagttattaaaattaataacctagaagtcactaaccgatctgtttcgtacaggtgctttgaagaacaattatttgagttaatcaaaacttaaatacgtttggaccgcgccgccacgag

SEQ ID NO: 1853 - DNA, 84 bp, Medicago sativa deltapartitivirus 1
  source 1..84: mol_type = other DNA
agaggataacctagctcgaagagggctagtgctatcgattacctggtataaaatcttaatattttaaacacgacagtatcaatt

SEQ ID NO: 1854 - DNA, 92 bp, Pepper cryptic virus 1; identical to SEQ ID NO: 692
  source 1..92: mol_type = other DNA

SEQ ID NO: 1855 - DNA, 94 bp, Pepper cryptic virus 2
  source 1..94: mol_type = other DNA
agaattttccaagccgtttacttggacctagttatctaggtaggaaaccgcttgggttaaattttaattttatatttaatagataagagccaac

SEQ ID NO: 1856 - DNA, 85 bp, Plant associated deltapartitivirus 1
  source 1..85: mol_type = other DNA
ctcacccacttggactagttccgcgggcgagagcttatagggtaaaataaattattatttaatcactcgtgttaactactacaac

SEQ ID NO: 1857 - DNA, 77 bp, Plant associated deltapartitivirus 2
  source 1..77: mol_type = other DNA
agaaagggccgatcacacatacggcccacagtcgtactagttggaaaatattatatatttctttcactctttccgct

SEQ ID NO: 1858 - DNA, 86 bp, Plant associated deltapartitivirus 3
  source 1..86: mol_type = other DNA
cccacattaacaaaggagtcatcaaagactccatttaatcgtgaggcaattattcaattttataattaaacttaacagttttcaac

SEQ ID NO: 1859 - DNA, 76 bp, Plant associated deltapartitivirus 4
  source 1..76: mol_type = other DNA
tgaatacccaagtaccagcttgggtgactaagcaacagggatagagaaaattatttttcaatcgtagactaccact

SEQ ID NO: 1860 - DNA, 78 bp, Plant associated deltapartitivirus 5
  source 1..78: mol_type = other DNA
agtaaatacccaagtaccaagcttgggtgactaagcaacagggagagagaaaattatttttcaatcgtagcatcaagt

SEQ ID NO: 1861 - DNA, 81 bp, Plant associated deltapartitivirus 6
  source 1..81: mol_type = other DNA
agcgtttatacttggtcctactttgtagggaggaaccgcttgggttaaaagttatttgaaatttaacagataacagtcact

SEQ ID NO: 1862 - DNA, 154 bp, Port Orford cedar deltapartitivirus
  source 1..154: mol_type = other DNA
ggatcatttatctaagttaggttaggaaaactttgaattttagttataaatttctataaattctgttgactaaccagacccagcgtcgtacaggtgctcgctatcaaagaaaattattaagttaatcagaacttatattcgatagagatcgcaa

SEQ ID NO: 1863 - DNA, 108 bp, Quinoa-associated deltapartitivirus 1
  source 1..108: mol_type = other DNA
actatgcctgagcgggggccgtcatccagaaagcacggacccaggaaacaagacctggggaatcattgacggtaggagaaattattcttttacagtgtggacaccgct

SEQ ID NO: 1864 - DNA, 88 bp, Quinoa-associated deltapartitivirus 2
  source 1..88: mol_type = other DNA
atcaggtcgaaccgccgattcaaaccggcggacccggatactggttaggaataattatatttcacacagagacgttgtagctattaca

SEQ ID NO: 1865 - DNA, 95 bp, Red clover cryptic virus 3
  source 1..95: mol_type = other DNA
agaatttaaaccagtcgtaaaccggctcatcaaaagggctggcgttttatcgaactgggaataaatactaatttatatcacgacagtactcaatt

SEQ ID NO: 1866 - DNA, 67 bp, Ribbonwort deltapartitivirus
  source 1..67: mol_type = other DNA
ctacttacaggtggccttttgttattacatgaggccttgttaagagctttatgttattataaatata

SEQ ID NO: 1867 - DNA, 178 bp, Silvergrass cryptic virus 1
  source 1..178: mol_type = other DNA
gataatgattcattaggaatcatttatcgcacgttagttagaaaacgcgtaggaaaacttgtatgttgtgtataagctacctcgagttactaaccacgcatcctctcttttgcagactaaaagaagattttaatcaagcaacgaaacttaattaaatcgtacagtcgcaagctagaag

SEQ ID NO: 1868 - DNA, 131 bp, Spinach deltapartitivirus 1
  source 1..131: mol_type = other DNA
tctaggtccaagatactacagtcgtagtaaacagaatccgatcattcctacgggagctcttagaaagagtcagatcacttgattcgaactactgaccgtgatccaccagacgtccaggtaggcacacaaca

SEQ ID NO: 1869 - DNA, 165 bp, Subalpine fir deltapartitivirus
  source 1..165: mol_type = other DNA
aagaatcattatcatagtttaggtaggagacttagaattagaaatcccaagtacaaaattggtttctactagtcacctcaccaaatcgttttgtttgctgtgatgcaggtaattattttatgattaactgagtgtttttcacttttacatcgcgccgcatacaag

SEQ ID NO: 1870 - DNA, 34 bp, Taiwan douglas-fir deltapartitivirus
  source 1..34: mol_type = other DNA
ctttagctttccgtgccagacgaccatacacgct

SEQ ID NO: 1871 - DNA, 80 bp, Vaasa deltapartitivirus
  source 1..80: mol_type = other DNA
gggtgtgtttggtttttttttttttttttttgctcgccaaaatttcgctacacatgctagcttaacgataaacaaaagaa

SEQ ID NO: 1872 - DNA, 165 bp, Yunnan larch deltapartitivirus
  source 1..165: mol_type = other DNA
agggttcattatcatagtttcggtagagatttattttaggaattaccattttagaaaattaggttcctagtaacactctaaccaaaccgttttgtttgcgttgatgcaggattaaattaaagtttacctgagtgtttttcacttttacatcgccacgcacacgag

SEQ ID NO: 1873 - DNA, 68 bp, Cordyceps chanhua partitivirus 1
  source 1..68: mol_type = other DNA
cgcaaaatcgtctgagattttacctgatcccagagaccagggttgtaagcctccttcatctcactgcc

SEQ ID NO: 1874 - DNA, 53 bp, Erysiphe necator associated gammapartitivirus 1
  source 1..53: mol_type = other DNA
agagattttacccgtgtacggggttgttgcctccttcttttcggaaccaattc

SEQ ID NO: 1875 - DNA, 48 bp, Gammapartitivirus sp.
  source 1..48: mol_type = other DNA
gttttacctggttcccagggtttttgcctccttcacttcttgagcgtc

SEQ ID NO: 1876 - DNA, 64 bp, Metarhizium brunneum partitivirus 2
  source 1..64: mol_type = other DNA
cgcaaaaggtccgaccttttaccagtgatactgggtttttgcctccttcaaattcttgagcgaa

SEQ ID NO: 1877 - DNA, 69 bp, Ophiostoma partitivirus 1
  source 1..69: mol_type = other DNA
accgaaaatagtctatctgtttaccactgttaccagtgggttttattcctccttcatttcttgcgccga

SEQ ID NO: 1878 - DNA, 411 bp, Aegean partiti-like virus
  source 1..411: mol_type = other DNA
tcgagattgtataaagtctgatttttcagatacgtacttcgttgggggacggtttcctgagccaaggtttttagtttgtctaaaactgattactgtccactccctccctgagctcctctgtcgaacggtcgacattgctcttgccagcctacgcctcttgaggttcattgctgcatttagtatagaccactaggagttcctaacccgttctttaaaaataaagacctagtataattatttgttgcttttcgctatgtgatgaatagagttggatatcagtgttttattccctcagttttgactctccggctgtcactgtgactttatttctttacgcgtaggtttttcctatcctctacttaccacggcggtacttatgataggaggaggttaacccccctaacaaggggg

SEQ ID NO: 1879 - DNA, 99 bp, Alloteropsis cryptic virus 1
  source 1..99: mol_type = other DNA
cgtgtatcattattgcgagattcgcttgaattttgttattcttcaagaagtataacactatgtcaggtgactatcgagaagctctactaagctatcgag

SEQ ID NO: 1880 - DNA, 79 bp, Alloteropsis cryptic virus 2
  source 1..79: mol_type = other DNA
ttttcgggcacaatacacacaaaagtggttgtgcgccaagtccaaggttattattatttaacactatcctctatccact

SEQ ID NO: 1881 - DNA, 34 bp, Alternaria alternata partitivirus 1
  source 1..34: mol_type = other DNA
cgaaaattagtcacaatatcatagttcccagcac

SEQ ID NO: 1882 - DNA, 53 bp, Alternaria dianthicola partitivirus 1
  source 1..53: mol_type = other DNA
cgaaatttacccgtggttcgccggtatctttcctccttcatatttcagactcg

SEQ ID NO: 1883 - DNA, 52 bp, Alternaria tenuissima partitivirus 1
  source 1..52: mol_type = other DNA
cgaaatttactgcgtgttaccagtacttttcctccatcatttttcagactcg

SEQ ID NO: 1884 - DNA, 73 bp, Amaranthus cryptic virus 1
  source 1..73: mol_type = other DNA
ggcggcgatttatttatcaaatcgcccaaggtttgacggtgctagaaattattttacacagtacgtcgtcact

SEQ ID NO: 1885 - DNA, 78 bp, Amaranthus cryptic virus 2
  source 1..78: mol_type = other DNA
ctcatagttatcgggagccgatagcttggaggtggttaggaataattatatttcaatacagcatcttgttttgtcaag

SEQ ID NO: 1886 - DNA, 68 bp, Amaranthus cryptic virus 3
  source 1..68: mol_type = other DNA
cctagaaattaagaattcacattcgtctacagcaacaagtcctaggaaaacctctgctctgcttaaat

SEQ ID NO: 1887 - DNA, 68 bp, Amaranthus cryptic virus 4; identical to SEQ ID NO: 1886
  source 1..68: mol_type = other DNA

SEQ ID NO: 1888 - DNA, 61 bp, Ambrosia cryptic virus 1
  source 1..61: mol_type = other DNA
ttctgattcacaatacgaagacgaaactccactgctctttcaactttgctacctactctac

SEQ ID NO: 1889 - DNA, 93 bp, Ambrosia cryptic virus 2
  source 1..93: mol_type = other DNA
aatttttatcccctacttacgataaacccaagttaaagcttgggatttctaagcaggagaggaaagatttattttcacttagctaacgcaatt

SEQ ID NO: 1890 - DNA, 99 bp, Aplosporella javeedii partitivirus 1
  source 1..99: mol_type = other DNA
gaaattttcttacgcaatacactttgcctttgaaatttaatttcgctcaaaattttgaaactctcaaaatttcaaacaagcaatttcactcccaccaac

SEQ ID NO: 1891 - DNA, 189 bp, Apple partiti-like virus 1
  source 1..189: mol_type = other DNA
catcaccgcagcgaggtgacgctcatatcgtactatgcactcaggtcttggcaagcctggaacggtgagctgttgacttgctcttgaagtcaacgttacgacacagcaatgtgtcactgtacagtgtgctgaaggcgagtcgaacctacactgtatcccacaccatgacgacacgattggaggtgctac

SEQ ID NO: 1892 - DNA, 133 bp, Apple partiti-like virus 2
  source 1..133: mol_type = other DNA
ctgagatgataccaacgtggtgttgcagaccacattgccatgcgtggagcatgttgcataggtaccctccatgtgttggtcacacacggtactcgtcatctttgtgacccagttcaagtaagggaggataggc

SEQ ID NO: 1893 - DNA, 190 bp, Apple partiti-like virus 3
  source 1..190: mol_type = other DNA
ctcagtgattacgcgtcttcggacgggaatggtccacgtcacggactcataccagtgcaggtcaaagcattggaagtagttctacgacctcggctgataaccgtgtgcattatgctctggctctgtgggcgttatccagaacgctgccagaacagttacccgctggaacgactaatggatgggaggtgct

SEQ ID NO: 1894 - DNA, 104 bp, Arabidopsis halleri partitivirus 1
  source 1..104: mol_type = other DNA
ctggccaggcccatttatggagagaggtcaaaatataggaagggaacctacaaagcttccatctttctctattttctctcaacagacattctgttcacacacta

SEQ ID NO: 1895 - DNA, 57 bp, Asiatic toad partiti-like virus 1
  source 1..57: mol_type = other DNA
gttgatgaggaccttatataggtccccatgtgaaactttatcaaaatcacactttaa

SEQ ID NO: 1896 - DNA, 117 bp, Asiatic toad partiti-like virus 2
  source 1..117: mol_type = other DNA
gaaagtccttctacatctatttccatgagttcctaacagaactccaaatttattgtgttgtcgtcgtgttcgctccgttactgtgtcgcggaaccacttgtcggcctcaacaattaa

SEQ ID NO: 1897 - DNA, 122 bp, Asiatic toad partiti-like virus 3
  source 1..122: mol_type = other DNA
tctacgaggtcaaccggtgaaactttatcaaaatcaccatacaattttatttggttacacaaccacttcctacatgccgtgttccgcttgttacactttctgtttgtactcttctcccctaa

SEQ ID NO: 1898 - DNA, 29 bp, Aspergillus creber partitivirus 1
  source 1..29: mol_type = other DNA
cgaaataagtcacaacattataaggtcac

SEQ ID NO: 1899 - DNA, 36 bp, Aspergillus flavus partitivirus 1
  source 1..36: mol_type = other DNA
aaacttttggttgaagagaactagtaattctcacga

SEQ ID NO: 1900 - DNA, 90 bp, Aspergillus flavus partitivirus 2
  source 1..90: mol_type = other DNA
cttgaactggttaccagaaaagtaaacagtattaagttttctaaaagtaaaaaacttgcactcttatttcactaacactttcgtgtaaac

SEQ ID NO: 1901 - DNA, 65 bp, Aspergillus fumigatus partitivirus 1
  source 1..65: mol_type = other DNA
cgcaaaagacccttgtcttttaccgccttgcgggttttcttgcctccttctcttcttgagcgtaa

SEQ ID NO: 1902 - DNA, 34 bp, Aspergillus fumigatus partitivirus 2
  source 1..34: mol_type = other DNA
cgaaaatgagtcacaacataacagttcccagcac

SEQ ID NO: 1903 - DNA, 34 bp, Aspergillus nidulans partitivirus 1
  source 1..34: mol_type = other DNA
cgaaaatgagtcacaacacactgaacaggagcat

SEQ ID NO: 1904 - DNA, 32 bp, Aspergillus niger partitivirus 1
  source 1..32: mol_type = other DNA
tgtctgcacgggaattagtgcccctggctcaa

SEQ ID NO: 1905 - DNA, 63 bp, Aspergillus protuberus partitivirus 1
  source 1..63: mol_type = other DNA
cgcaaaacgtgtacacgttttacctgtcatcagggttttcgcctccttcttttcttgagcgaa

SEQ ID NO: 1906 - DNA, 144 bp, Atrato Partiti-like virus 2
  source 1..144: mol_type = other DNA
tcattaccgaaaaatcgcaagcaagcgttcagcagattaccggatgggaagggttttccctttagtctacttcctgctaggaaagacacctgggcggaagaagtgtgcaatcgccacttcggtcctaaacccgtatcccaggtc

SEQ ID NO: 1907 - DNA, 55 bp, Atrato Partiti-like virus 3
  source 1..55: mol_type = other DNA
gaacagagcgagtgcatatggggaatttctcgtgttattcaatacgggcctcagg

SEQ ID NO: 1908 - DNA, 12 bp, Atrato Partiti-like virus 4
  source 1..12: mol_type = other DNA
agatttcgagcg

SEQ ID NO: 1909 - DNA, 42 bp, Atrato Partiti-like virus 5
  source 1..42: mol_type = other DNA
cgttatccggttttaaagttaaaaagcattggtgtgatcacc

SEQ ID NO: 1910 - DNA, 106 bp, Atrato Partiti-like virus 6
  source 1..106: mol_type = other DNA
gaaaaagaccgagcattttactttttctttatgctacgagccgtcatcccggacgtaaaacgtgcaatatggaatattatcggttcctcctatctttggtagcgct

SEQ ID NO: 1911 - DNA, 32 bp, Bactrocera dorsalis partiti-like virus 1
  source 1..32: mol_type = other DNA
cgctgaatgctatcaagatatactgaaacaaa

SEQ ID NO: 1912 - DNA, 55 bp, Bactrocera dorsalis partiti-like virus 2
  source 1..55: mol_type = other DNA
ctctctccgcttgaatcagtcgaaaattaccatacaaatcttactcttagccaca

SEQ ID NO: 1913 - DNA, 24 bp, Bactrocera dorsalis partiti-like virus 2 isolate Bf
  source 1..24: mol_type = other DNA
atcaaatcttactcttagcccata

SEQ ID NO: 1914 - DNA, 31 bp, Bactrocera dorsalis partiti-like virus 2 isolate Bl
  source 1..31: mol_type = other DNA
tccgatctcaaaaatcttactcttagccaca

SEQ ID NO: 1915 - DNA, 31 bp, Bania partiti-like virus
  source 1..31: mol_type = other DNA
cgtaaggaatcctgattattgactggacaat

SEQ ID NO: 1916 - DNA, 68 bp, Beauveria bassiana partitivirus 1
  source 1..68: mol_type = other DNA
cgcaaaaacccacgtttttggccgtgtaacacggagtttttatgcctccttcatctcctgagcaagaa

SEQ ID NO: 1917 - DNA, 53 bp, Beauveria bassiana partitivirus 2
  source 1..53: mol_type = other DNA
ccgaccttttacctggttctcagggtttctgcctccttcacttcttgagcgta

SEQ ID NO: 1918 - DNA, 48 bp, Beauveria bassiana partitivirus 3
  source 1..48: mol_type = other DNA
cccattatacttatttacaagtactttggctatactgacccatccaat

SEQ ID NO: 1919 - DNA, 289 bp, Benes partiti-like virus
  source 1..289: mol_type = other DNA
actttgtcactgattatgagctatgctctaactcggttgttgagtaacacaaaccatgaggtgacttcacaaagtgatgacttcagaaagttgatgactagaattcaaagaatccgctaacatcgtaatgttctggcaggctctcgctagttaagtggagagttcgttgtgaagtacgaaacttcattgcaaggaaaacaattgaaactcccgtgaggcctgagatcacgttaaaagagcaggagattggtgcacttaagtatacgaatttagagaggaggtaaatcta

SEQ ID NO: 1920 - DNA, 77 bp, Bipolaris maydis partitivirus 1
  source 1..77: mol_type = other DNA
gaattactctctccgaattctcttcggtctcataaaattaaagagtttttatccctgcagaactttctacacacctc

SEQ ID NO: 1921 - DNA, 57 bp, Bipolaris maydis partitivirus 2
  source 1..57: mol_type = other DNA
agacattctctacccatttacagtagcagaagaacaccttaacttggttcccaccct

SEQ ID NO: 1922 - DNA, 104 bp, Black raspberry cryptic virus
  source 1..104: mol_type = other DNA
agaattaccccaccaacttgaaaattggcttcagatacgatatctgaagtaaattcagtcggtgcaggatttattaaaattcacaacactcaacgctttatatt

SEQ ID NO: 1923 - DNA, 34 bp, Botryosphaeria dothidea partitivirus 1
  source 1..34: mol_type = other DNA
cgaaaatgagtcacaacattacaattcccagcac

SEQ ID NO: 1924 - DNA, 95 bp, Botryosphaeria dothidea partitivirus 1-like
  source 1..95: mol_type = other DNA
accttcctctaaggctaaatatgatatataagcgatagtgaatgagtaccgtgagggaaatatcttgaaataggcaacattacaattcccagcac

SEQ ID NO: 1925 - DNA, 75 bp, Botryosphaeria dothidea partitivirus 3
  source 1..75: mol_type = other DNA
gagtgcaatctcaatttatgagtggtaaacgttccgtgaccaacggatacgtgatacagtaaatctccgcgcgcg

SEQ ID NO: 1926 - DNA, 63 bp, Botryosphaeria dothidea partitivirus 3-1
  source 1..63: mol_type = other DNA
cgcaaaactctcaagttttaccgtgttacgggttttccgcctccttcattacatagacctttc

SEQ ID NO: 1927 - DNA, 61 bp, Botryotinia fuckeliana partitivirus 1
  source 1..61: mol_type = other DNA
cgcaaaagtccaacttttgacagtgaaaactgtttttctgcctccttcattccttgagcaa

SEQ ID NO: 1928 - DNA, 86 bp, Botrytis cinerea partitivirus 2
  source 1..86: mol_type = other DNA
agaatatttatcatatttcgataaaattttctttacttgaactgaaacaaggacataatcaaatttcaaaccttacacaattaaac

SEQ ID NO: 1929 - DNA, 43 bp, Botrytis cinerea partitivirus 3
  source 1..43: mol_type = other DNA
ggtttttccagtttatttccttcttcattttcgaaaacaatac

SEQ ID NO: 1930 - DNA, 59 bp, Bremia lactucae associated partitivirus 1
  source 1..59: mol_type = other DNA
gaaatctgctaacccttatttcccaaaaatttaatctaaaagatattctactcatccct

SEQ ID NO: 1931 - DNA, 104 bp, Caloscypha fulgens partitivirus 1
  source 1..104: mol_type = other DNA
ctaccggtcgccaccatgaaatttatctgtggaacccctctcacacatataagaattcccttattagttcctttcagaatttttaattagctaacccttccaaa

SEQ ID NO: 1932 - DNA, 103 bp, Caloscypha fulgens partitivirus 4
  source 1..103: mol_type = other DNA
ctaccggtcgccaccatgagttaaatctagagatcatcgctcttaccgctgaaatctcaaaacatcccccctgctcccaagcctcacccaagatccactcaaa

SEQ ID NO: 1933 - DNA, 63 bp, Caloscypha fulgens partitivirus 5
  source 1..63: mol_type = other DNA
ccgcccgcctaaaaaacttcgcaagtttactacttgaactattatctacctcccccgatcaca

SEQ ID NO: 1934 - DNA, 178 bp, Camellia cryptic virus 1
  source 1..178: mol_type = other DNA
gataatgatccccaaaaggggatttccattatcacttggattagatccttatagattttataatgatgagttataaacgtctacttgtgttctaaccaacttgtttaatgcaggtgagtagaaaagaatcttaggttacaacgtagctgttattttctgcatacccgcgtatagcaag

SEQ ID NO: 1935 - DNA, 80 bp, Camellia cryptic virus 2
  source 1..80: mol_type = other DNA
atgggcgctaattaaaacttagcgcgaaccagtgctattggtgttagttaatcataacaatactaccggttgcaatttta

SEQ ID NO: 1936 - DNA, 542 bp, Cane toad associated partiti-like virus
  source 1..542: mol_type = other DNA
gagacagcagagctcattcggatgatcaatttttagatccattccgaagagtttctttgcacgcattacaaggtcgtcatcaacgcatgtacaacaacgagtgtgacaatcgtcgccgtatgccactgtcagcgaaggaaatggaccttgtataattagcctcgatgggcagtcgcagtcatgaagttcgtacatgacaatgtaggaaatgatggtatcaataatgttagttaacatgcctcccgagggtacgccatgcttcaaatacagtggctttgtgatctggggagtcacgactttcttattggtgtaaacgtgctctacccactttaataatgtatggataccagttggtataccataatgctcgtattgtgttagatccaagcaacatcttagtacagtgaaggctgctcgaatgacccaagatggtacactagaatcaaacttcgaaaaatcgaaggatttcgcgtatttaccacagaaatactcgtgatgagtttcaggtttaggaacccaattctctggtaaccgcgttaaga

SEQ ID NO: 1937 - DNA, 115 bp, Canna indica partitivirus
  source 1..115: mol_type = other DNA
gcttagcatacctcctaaaccatcaccttttgctgaagcgtgttttggtgttcaacacgatttagcaagaagatcacaccttcaacctgtccttgttaaacgcgatctactcagt

SEQ ID NO: 1938 - DNA, 84 bp, Cannabis sativa partitivirus
  source 1..84: mol_type = other DNA
gagaacagtaactctcaaaagcttcttgtaatcacaatagaatacaaactctactgctctgtcttatttaatacctactctaaa

SEQ ID NO: 1939 - DNA, 100 bp, Carnation cryptic virus 3
  source 1..100: mol_type = other DNA
agaatttatccttacttgcccacacaagaggacgaggagtccgaggagcaagcttaagggtgaaatttactattattttatcgtgacacactattacagt

SEQ ID NO: 1940 - DNA, 91 bp, Ceratobasidium partitivirus
  source 1..91: mol_type = other DNA
acaggaaagacccgctaaggttttactgtctcctcagacaatcccagcgacctctcttgtaaccaagctcagcccaccaagcctactcaca

SEQ ID NO: 1941 - DNA, 159 bp, Chiles partiti-like virus
  source 1..159: mol_type = other DNA
cgatcttgatgaagtacagttttattcaagttattttattgaacaatctaagctaatgctggcagggacagtagaggctcaaatgcgaacgagattgtgacactttctttccataacaatctgccttgttatgagattgaaacgaggaggtagttcaga

SEQ ID NO: 1942 - DNA, 107 bp, Citrullus lanatus cryptic virus
  source 1..107: mol_type = other DNA
agaattttcccccagtcaacattggtggagcacaaaacaaacagtttgtgcccacggtcgattggtgtaagaattattctttactacgatcttgttatcattaactg

SEQ ID NO: 1943 - DNA, 93 bp, Citrullus lanatus partitivirus
  source 1..93: mol_type = other DNA
gtcaacattggtggagcacaaaacaaacggtttgtgcccacggtcgattggtgtaagaattattctttactacgatcttgttatcattaactg

SEQ ID NO: 1944 - DNA, 62 bp, Cladosporium cladosporioides partitivirus 1
  source 1..62: mol_type = other DNA
cgaaaattgtccgcgattttaccgtgcaaacgggtttatcctccttcatctcttgagccgaa

SEQ ID NO: 1945 - DNA, 53 bp, Cladosporium cladosporioides partitivirus 2
  source 1..53: mol_type = other DNA
catttattgaccgtagatccgctctagctcaataaaaacctcatcccgttttc

SEQ ID NO: 1946 - DNA, 62 bp, Cladosporium ramotenellum partitivirus 1
  source 1..62: mol_type = other DNA
cgaaaatgccccgcgcttttaccgtgtaaacgggtttatccttcttcatcccttgagccgaa

SEQ ID NO: 1947 - DNA, 66 bp, Clohesyomyces aquaticus partitivirus 1
  source 1..66: mol_type = other DNA
aatcagatcattctttacttgaactgtaacaaggacaaatcaaatcacaaactgacaacaacaaca

SEQ ID NO: 1948 - DNA, 75 bp, Colletotrichum associated partitivirus 1
  source 1..75: mol_type = other DNA
cgttttgaagggcaaaaacgtttgatttttgttaaaacccacaccctttctcaagctctcaccccgctggagaaa

SEQ ID NO: 1949 - DNA, 67 bp, Colletotrichum associated partitivirus 2
  source 1..67: mol_type = other DNA
agaatttctttcctaatactttaggttcaacgaaaagaaactctaagtcccaaaacgactttaaact

SEQ ID NO: 1950 - DNA, 64 bp, Colletotrichum eremochloae partitivirus 1
  source 1..64: mol_type = other DNA
atcagaacatcttctaaggtagcgataagtcttagctctaagttaagcatttcacacgcacata

SEQ ID NO: 1951 - DNA, 56 bp, Colletotrichum gloeosporioides partitivirus 1
  source 1..56: mol_type = other DNA
cgtttgatgtccttagctttcctggacctctcaaagttctcaccccgctgtagaaa

SEQ ID NO: 1952 - DNA, 64 bp, Colletotrichum liriopes partitivirus 1
  source 1..64: mol_type = other DNA
cccattatagatggaacaaactatatttggagtaagagtctaattacgattagcattactcgac

SEQ ID NO: 1953 - DNA, 103 bp, Colletotrichum truncatum partitivirus 1
  source 1..103: mol_type = other DNA
agagtaaaatcttccatttcactcaaggaatgaaggaggcgcaaaagctccgtcttttactcgtgtaaacgaggtttttcgcctccttcattccttgagcgaa

SEQ ID NO: 1954 - DNA, 40 bp, Costanza partiti-like virus
  source 1..40: mol_type = other DNA
cgttggatttccgacaccgcgagaaactatttctttaaac

SEQ ID NO: 1955 - DNA, 93 bp, Cucumis melo cryptic virus
  source 1..93: mol_type = other DNA
agaattttcatccctctgttgatgaaaagtgttaaccacactaaaacaaagggagaatattttattatagagatataatcctctaagactaag

SEQ ID NO: 1956 - DNA, 86 bp, Culex pseudovishnui partitivirus
  source 1..86: mol_type = other DNA
gtttttaatcactgagctctacaggaagtcattcgactcgtcctaaaccgttatatttcgtgaacctaacgctataaacaaacaga

SEQ ID NO: 1957 - DNA, 58 bp, Curvularia lunata partitivirus 1
  source 1..58: mol_type = other DNA
cttactcggtctcgtaatattaaagagtaactatctctgcagattctatctacacact

SEQ ID NO: 1958 - DNA, 64 bp, Curvularia lunata partitivirus 1
  source 1..64: mol_type = other DNA
ccgaatcttactcggtctcgtaatattaaagagtaactatctctgcagattctatctacacact

SEQ ID NO: 1959 - DNA, 75 bp, Curvularia lunata partitivirus 2
  source 1..75: mol_type = other DNA
agaaaattttgtaggaagcctctgctatctctgcaaactgctacaaatcctttttacaggtcccccttctacaca

SEQ ID NO: 1960 - DNA, 67 bp, Cytospora sacchari partitivirus MP-2014
  source 1..67: mol_type = other DNA
tccgcgtgtttgaagattacaaaagctagtactcttcgtttgcctccttcttttcgatagcctgttg

SEQ ID NO: 1961 - DNA, 149 bp, Dactylorhiza cryptic virus 1
  source 1..149: mol_type = other DNA
ccccctactaagctagaattttataccaacccccccgatttggtagaagctcatacacggggcttcccagaggagttggtaagggaaaattattttccaccagtgttaaccaatacaagttaacacacactaaaacaaactaaacaaga

SEQ ID NO: 1962 - DNA, 80 bp, Dactylorhiza cryptic virus 2
  source 1..80: mol_type = other DNA
cacacgtaaaattctaacaaattgactcagcgtcagttttgttatagacgcaggtgtaggatataaattctaaacagcag

SEQ ID NO: 1963 - DNA, 87 bp, Dactylorhiza cryptic virus 3
  source 1..87: mol_type = other DNA
cgttaaaccaagtggccttattagtttataataagtgctattaacgctggttgtcaaaattataaaaacaacacatcgtgttcctct

SEQ ID NO: 1964 - DNA, 202 bp, Davola partiti-like virus
  source 1..202: mol_type = other DNA
agtcatcttacacaagatgcttaagttaagattgtggaagtgaatccatcaccatttgggtgtcacaactgagtgggaagcttacagatggaagcttctgatggaggagagattatgaatgtttactgggctgttttgcagtcaaacagagccagtaaagcttctggtgttctggctttaactagaaaggaggtcacatggt

SEQ ID NO: 1965 - DNA, 93 bp, Delitschia confertaspora partitivirus 1
  source 1..93: mol_type = other DNA
ctcttccgatctcacaacattacatttacctgcacttggcatttaattctctttcttggtagttccgtcgcgctggaaaagccgaccgtctac

SEQ ID NO: 1966 - DNA, 68 bp, Dichroa partitivirus 1
  source 1..68: mol_type = other DNA
agattaagtcctgaagaaactttaccctcagtctataaaaacttttaaagacttatattctacacata

SEQ ID NO: 1967 - DNA, 189 bp, Dichroa partitivirus 2
  source 1..189: mol_type = other DNA
tggctctaaatggaggtccgacagggtagatggaagggttctcacgagttttcgatggaaagttccagaattttcccttaccagaactagggagcgcatcaaatcacattggtgctctcgtcgggttttggttagaaaattatttcttactacgagtgtactacaatacaaagtacacagcactaaatc

SEQ ID NO: 1968 - DNA, 92 bp, Dill cryptic virus 1
  source 1..92: mol_type = other DNA
gatcaaagaataacagctcttgttacaatttttcggaatcaaaatagaacctgaaacttagctgctctatctcaacttgttacctactctaa

SEQ ID NO: 1969 - DNA, 75 bp, Diplodia seriata partitivirus 1
  source 1..75: mol_type = other DNA
cccaaaattcttggcacacacgattttatggtagttatgagtcttctcagttagaagcaaacgcacactatcgaa

SEQ ID NO: 1970 - DNA, 82 bp, Diuris pendunculata cryptic virus
  source 1..82: mol_type = other DNA
aagaaatcgaacttataaaattcttcaaccaaaatataaattgaattacgattgactacaacggatcttacctcttaccgtc

SEQ ID NO: 1971 - DNA, 134 bp, Drechslerella stenobrocha partitivirus 1
  source 1..134: mol_type = other DNA
aaaagaagccattgaagaagaagccattgaagaagaagaaggtcatcaagaagaagaaggtcgagaagaagccctacaatcacaacttgcacccttctatatctccagctcttatcaagcctcatcaaatcacg

SEQ ID NO: 1972 - DNA, 28 bp, Drosophila biauraria male killing partitivirus 1
  source 1..28: mol_type = other DNA
agattttctcgttatagatattgacgaa

SEQ ID NO: 1973 - DNA, 83 bp, Echinochloa crusgalli partitivirus
  source 1..83: mol_type = other DNA
actcttacccctggtcttacaaatctaaagaattttagtctttgcagaattactctacatatacacacacacacaaacacaca

SEQ ID NO: 1974 - DNA, 26 bp, Enontekio partiti-like virus
  source 1..26: mol_type = other DNA
accttggggatccctctttagtgatg

SEQ ID NO: 1975 - DNA, 105 bp, Entoleuca partitivirus 1
  source 1..105: mol_type = other DNA
ctccgacagctctcaaccgctctcgattcccaacttaattgtctgctctccgtcttaagaacttccctacgtcaattttctctcgtacaagctactcttataaat

SEQ ID NO: 1976 - DNA, 88 bp, Entoleuca partitivirus 2
  source 1..88: mol_type = other DNA
agttttctctagctcgcgcctcataagccacttttgaatataacaagcctcaaaactttgccacctaacaactctcctgcgttttacg

SEQ ID NO: 1977 - DNA, 45 bp, Entomophthora partitivirus D
  source 1..45: mol_type = other DNA
aaaggattaatttaatacgaagcggcagccccacaatttattgat

SEQ ID NO: 1978 - DNA, 54 bp, Erysiphe necator associated partiti-like virus 1
  source 1..54: mol_type = other DNA
cttttcttttggttgtaagtccaggctgacagtctggcaattcacgaattaaca

SEQ ID NO: 1979 - DNA, 53 bp, Erysiphe necator associated partitivirus 1
  source 1..53: mol_type = other DNA
cttcaacctctattccctaaaaatttaattctaaaagattttctacctaccct

SEQ ID NO: 1980 - DNA, 52 bp, Erysiphe necator associated partitivirus 11
  source 1..52: mol_type = other DNA
cctcttttggtaataagccttctcagtttgaggagcattcacgatcaactca

SEQ ID NO: 1981 - DNA, 90 bp, Erysiphe necator associated partitivirus 12
  source 1..90: mol_type = other DNA
ctagaaaggaggcagactctagatcagaaaggaactgagacacaacagaaaatccaacacacaaacacaccaacatcaacaacacacaca

SEQ ID NO: 1982 - DNA, 54 bp, Erysiphe necator associated partitivirus 2
  source 1..54: mol_type = other DNA
ccgcccttttggccgtgcaaacggattttagcctccttcatctctaaagcgaaa

SEQ ID NO: 1983 - DNA, 51 bp, Erysiphe necator associated partitivirus 3
  source 1..51: mol_type = other DNA
cgcgcttttaccgtgtaaacgggtttatccttcttcatcccttgagccgaa

SEQ ID NO: 1984 - DNA, 86 bp, Erysiphe necator associated partitivirus 4
  source 1..86: mol_type = other DNA
cgaaactgaactccgtaactcaatctttgctatactgtcgcaaatttttcagcccttcctacgctttttcgtaacctctacccact

SEQ ID NO: 1985 - DNA, 118 bp, Erysiphe necator associated partitivirus 5
  source 1..118: mol_type = other DNA
cgagactcttgattatagccaaatataatcttattcactcgaatttcttttggacctccaccctcaaagtccaccgaagttagcaactcgactagtttttactaaacccatatcgaaa

SEQ ID NO: 1986 - DNA, 20 bp, Erysiphe necator associated partitivirus 7
  source 1..20: mol_type = other DNA
agaaaaccatcccgtcttca

SEQ ID NO: 1987 - DNA, 378 bp, Erysiphe necator associated partitivirus 9
  source 1..378: mol_type = other DNA
cttgattggttaaccaaccgagcactgaagttctttcagcaagaagaagtggatcaagcactgtcgaatcgacgatcggaacacagtgaagaagcactcatcaatgacttcaaatcattcgagcagccctatcatcctataccaaaggataatcattactatgatgctgtcgaaaaagtcagagaactctttcaccctggcaatcttttgctacccgtgtcgtttcccgaccttcgctactatccatggaaactcaaaccgaatgctgaagcaccctggaacattccagactttacattcactccgacttttcgcaacttagatgatgaatctgagaacccgaaacttcacgagaatctatctcgactatccaattgg

SEQ ID NO: 1988 - DNA, 92 bp, Erysiphe necator partitivirus 1
  source 1..92: mol_type = other DNA
agcaaccgatcaatcgacgagaaaagaatacttgagaacctagtgacttctacttaaaaattctttgcaaaaattcacaattttactttaca

SEQ ID NO: 1989 - DNA, 65 bp, Erysiphe necator partitivirus 2
  source 1..65: mol_type = other DNA
atgttcaaaagatcgttatttttctaacgccattaaaagaacaaactttgattattatatttaaa

SEQ ID NO: 1990 - DNA, 72 bp, Erysiphe necator partitivirus 3
  source 1..72: mol_type = other DNA
cgagaataagcactcgcagatcttattactgagtatttacttttaatatttcaactcaagaaaatttaaata

SEQ ID NO: 1991 - DNA, 29 bp, Flumine partitivirus 1
  source 1..29: mol_type = other DNA
cccaattaaagtccactacagttagctac

SEQ ID NO: 1992 - DNA, 115 bp, Flumine partitivirus 2
  source 1..115: mol_type = other DNA
caacaatcgaggacacggtctaagatattggaacactgcttttgcccgacaacatctagtgaaatctcacgaagatgacaaagtccgcttagtttttggtgccccatctacattt

SEQ ID NO: 1993 - DNA, 105 bp, Flumine partitivirus 3
  source 1..105: mol_type = other DNA
tttttttaaagcggccctgctttaaaaattaagaattcacattcacctaaaatcaacaagttttcacaacccctgctctgattatttactcccaacgtcccaacc

SEQ ID NO: 1994 - DNA, 182 bp, Fragaria chiloensis cryptic virus
  source 1..182: mol_type = other DNA
gataatgatcaaccgaaaaggttgattttcattatctagaagtaaattttctattgtaaattttcattatgaaattaacattagaagttacttctacacactaccgtgtatagcgagtttataagatttcaaattttagagttatctaattgtttactatcttacatccgttatatacaggt

SEQ ID NO: 1995 - DNA, 67 bp, Freshwater macrophyte associated partiti-like virus 2
  source 1..67: mol_type = other DNA
tttatataagacacgtcaaggcctgtactgagccacaaatttccaaagaaaagcgtaaaattttagt

SEQ ID NO: 1996 - DNA, 17 bp, Freshwater macrophyte associated partiti-like virus 3
  source 1..17: mol_type = other DNA
tgtgaaatttttccggt

SEQ ID NO: 1997 - DNA, 49 bp, Fusarium cerealis partitivirus 1
  source 1..49: mol_type = other DNA
actttaggttccaggtaaccagccctgcactaaagtaccccatacccag

SEQ ID NO: 1998 - DNA, 34 bp, Fusarium equiseti partitivirus 1
  source 1..34: mol_type = other DNA
cgaaaatgcgtcacaacattatcatttccagcac

SEQ ID NO: 1999 - DNA, 77 bp, Fusarium mangiferae partitivirus 1
  source 1..77: mol_type = other DNA
agaatttctctgggtcccccgccttctgagaattaaaagatttatagtcttactgacaacataacttgagtgtatct

SEQ ID NO: 2000 - DNA, 61 bp, Fusarium mangiferae partitivirus 2
  source 1..61: mol_type = other DNA
cgcaaagggtcataccttttaccgttcatcgggtttttgcctccttcactcccgaagcaaa

SEQ ID NO: 2001 - DNA, 87 bp, Fusarium poae partitivirus 1
  source 1..87: mol_type = other DNA
atgaagttttctccagaacgccccctggcctctcgaaatcttaaatacaaattttaaagaatattattcttcactcctcgtcacaac

SEQ ID NO: 2002 - DNA, 60 bp, Fusarium poae partitivirus 2
  source 1..60: mol_type = other DNA
tcggtatagagatccccccctcctacagtctctaaattaacagaataattacgcctcaat

SEQ ID NO: 2003 - DNA, 86 bp, Fusarium poae partitivirus 3
  source 1..86: mol_type = other DNA
agaatatttatcataaatcgataaaatcttctttacttgaactgaaacaaggacataatcaaatttcaaacctcacacaattaaac

SEQ ID NO: 2004 - DNA, 70 bp, Fusarium solani partitivirus 2
  source 1..70: mol_type = other DNA
tgaatttcttctcctattaaatttgggtcaacgaaaagaaaatttctaagtcccaaaacgactctaaatc

SEQ ID NO: 2005 - DNA, 88 bp, Gaeumannomyces tritici partitivirus 1
  source 1..88: mol_type = other DNA
ctctctcgttttcttttactaccctttttgtccgcttttttcaaatcttagaaaaacaaactctctcccctctcccccctcccctaca

SEQ ID NO: 2006 - DNA, 145 bp, Gaeumannomyces tritici partitivirus 2
  source 1..145: mol_type = other DNA
ctcgcgtctaccacacaacatggaggataaagatattgaacacttcccgttctcaatcataagtctccacaattaaaacttttttaagtgctctcaaactatcttgtactcgctctacctgtaaccactcagtctaccacacaac

SEQ ID NO: 2007 - DNA, 91 bp, Gaeumannomyces tritici partitivirus 3
  source 1..91: mol_type = other DNA
ccgaattcccgggatccagaatttctcgttgaagcccccgcgcctcttcagaaacactttcgtaagaaattgccccccttctactatcaac

SEQ ID NO: 2008 - DNA, 84 bp, Grapevine associated partitivirus-1
  source 1..84: mol_type = other DNA
aagttctctccagcacgcctcccggccgctcagaaatttacagaataattcttcatagaatattactcttcactcctgtctaca

SEQ ID NO: 2009 - DNA, 72 bp, Grapevine partitivirus
  source 1..72: mol_type = other DNA
gcccgcccacgacttatcaaatcttacccaacttttctctatcttagaacaaatttcactctccctggcaat

SEQ ID NO: 2010 - DNA, 47 bp, Grapevine-associated partitivirus 1
  source 1..47: mol_type = other DNA
ttttaccgtgttacgggtttctgcctccttcattacatagacctttc

SEQ ID NO: 2011 - DNA, 43 bp, Grapevine-associated partitivirus 2
  source 1..43: mol_type = other DNA
ggagctttctctggttcaacaaaaatcgttactactttcaatt

SEQ ID NO: 2012 - DNA, 95 bp, Great lobelia partitivirus
  source 1..95: mol_type = other DNA
gacggcccccgcttataaactcaagaatttacattcgtctaaactctttaaattctttctcctccaagacagaatttctcccacaacgttttaca

SEQ ID NO: 2013 - DNA, 74 bp, Grifola frondosa partitivirus 1
  source 1..74: mol_type = other DNA
gaacttctgtccacgcgccccccccgttcgcgcccaagaattcaatagtttctaatactacactagatttagca

SEQ ID NO: 2014 - DNA, 124 bp, Grosmannia clavigera partitivirus 1
  source 1..124: mol_type = other DNA
gcttggagtatgaattctttatgagagaattcctttgactccccataagtcttcccccataaagaattcatactccaagcttaacgcctaccctgcacgaagtaaatttcctctgcaactcaca

SEQ ID NO: 2015 - DNA, 29 bp, Guiyang partiti-like virus 1
  source 1..29: mol_type = other DNA
agaacaaagaacataagcagggaagccgg

SEQ ID NO: 2016 - DNA, 54 bp, Guiyang partitivirus 1
  source 1..54: mol_type = other DNA
atacgaccaacacgagagagcgtagtaaaaaaactttaccaagcgattttaaca

SEQ ID NO: 2017 - DNA, 104 bp, Gyromitra esculenta partitivirus 1
  source 1..104: mol_type = other DNA
agaatactctttccgggaaatctacctcggttctataaacttaaaagatatcaactcatcgcacattccgaaaccctgtacccaaacagtcccctcttctcaca

SEQ ID NO: 2018 - DNA, 66 bp, Hameenlinna partiti-like virus
  source 1..66: mol_type = other DNA
gtgtgtttggtcctgtatgaagtataaaatttatacatctaaaggacgcccgcgaaatcgcacact

SEQ ID NO: 2019 - DNA, 32 bp, Hangzhou partiti-like virus 1
  source 1..32: mol_type = other DNA
gagctgtccttttaaaacctcaccccgtctta

SEQ ID NO: 2020 - DNA, 43 bp, Hattula partiti-like virus
  source 1..43: mol_type = other DNA
ctatgaaattcatagcggaaatactaccaccatctatgggaat

SEQ ID NO: 2021 - DNA, 95 bp, Hebeloma mesophaeum partitivirus 2
  source 1..95: mol_type = other DNA
agaatcttataggacgatcgacacgcccttcctatcaacaactctcgatcgacacacaagaacctacgcaatcagtgaaatacctgaatctaacg

SEQ ID NO: 2022 - DNA, 97 bp, Hebeloma mesophaeum partitivirus 3
  source 1..97: mol_type = other DNA
agaaccttaacggacgaatcgctcgtatctccgttcaacaactacgattcgacacactaggacctaccgcactgtaaccagtcagaaccccaccaac

SEQ ID NO: 2023 - DNA, 37 bp, Hebron partiti-like virus
  source 1..37: mol_type = other DNA
cttaccggaagagatgtttccccaaaaatcaagtatg

SEQ ID NO: 2024 - DNA, 61 bp, Helianthus annuus leaf-associated partitivirus 1
  source 1..61: mol_type = other DNA
aagtaactttctactcttatttatccaagcttttaaattcttttccttagaaaacctagaa

SEQ ID NO: 2025 - DNA, 90 bp, Helianthus annuus leaf-associated partitivirus 2
  source 1..90: mol_type = other DNA
actgattatcctcgagatagcaggaagaaagcctgcgtgtctcgtattagggtaattttaattaaatttattatcacgacaggttcactc

SEQ ID NO: 2026 - DNA, 88 bp, Helianthus annuus leaf-associated partitivirus 3
  source 1..88: mol_type = other DNA
tgacagggttttggtccgtgttcggacgcgtttagaattgtctgtaattgtctcgacttttctgcctccttcttctcttgggcacgtg

SEQ ID NO: 2027 - DNA, 113 bp, Helianthus cryptic virus 1
  source 1..113: mol_type = other DNA
aagcatagcgttaggatcgtggcggcccggcactagaaattaagaattcacattcgtctaaattaacaagctcttacaaagcctctgctctgctaaaattcaaacgtttcact

SEQ ID NO: 2028 - DNA, 78 bp, Heterobasidion partitivirus 14
  source 1..78: mol_type = other DNA
agataagactctggagaagctctctctacttcttaaatctgaagaaattatttttctctgcaaaatcactgctaaatc

SEQ ID NO: 2029 - DNA, 110 bp, Heterobasidion partitivirus 16
  source 1..110: mol_type = other DNA
agataaactcttgattcaatctcgatatcaagttctaactcctaaaagtttcatactcccagcacctaccctgaaccctgttttacagaccccccccccctctcttcaca

SEQ ID NO: 2030 - DNA, 77 bp, Heterobasidion partitivirus 4
  source 1..77: mol_type = other DNA
ggatcaataagaaccgaaattccaacaatacaaagaattttaaactcgttcaattattatcacctcttaacaaatcg

SEQ ID NO: 2031 - DNA, 67 bp, Heterobasidion partitivirus 5
  source 1..67: mol_type = other DNA
aataaagaaatcaactcttggccctagatataaagccttcgaacgataattctttttacctctttcg

SEQ ID NO: 2032 - DNA, 101 bp, Heterobasidion partitivirus 9
  source 1..101: mol_type = other DNA
ggatcaaccgatcaaacagcactcaaaccgctaaagccctgaaaactaaagctttctcgctgctcttgaaatcttatccactacacacgtgtctcaccaac

SEQ ID NO: 2033 - DNA, 133 bp, Heterobasidion parviporum partitivirus Fr 110B
  source 1..133: mol_type = other DNA
ctacgaaaccttcactggtggctggctccgcttaaatgcagaactgcacaatggtcttattcgaagttcctttcttacaacagattggaaacgcttcgacaagcgcgcctattttagtctgattcatagaatc

SEQ ID NO: 2034 - DNA, 84 bp, Hymenoscyphus fraxineus partitivirus 1
  source 1..84: mol_type = other DNA
aaatattcggaataaaccgcatccccgaacttttgtaaagccctaagttttctcgcaggtttttttgactgaaatttacggaga

SEQ ID NO: 2035 - DNA, 66 bp, Hypomyces chrysospermus partitivirus 1
  source 1..66: mol_type = other DNA
caacagattactctttattggaactgcaaccaagccaaatcaaaaagcaaactactacaacacaac

SEQ ID NO: 2036 - DNA, 71 bp, Ilomantsi partiti-like virus 1
  source 1..71: mol_type = other DNA
gtactgtacaagcatatccaaacacacctacagctacctcctttaaagttctcactaccgggtactgatgt

SEQ ID NO: 2037 - DNA, 72 bp, Ilomantsi partiti-like virus 2
  source 1..72: mol_type = other DNA
gtgttgggtgtgtttggcggcgtgggtcattcccacattaaggcattgccaccggcagttacggactactct

SEQ ID NO: 2038 - DNA, 93 bp, Impatiens cryptic virus 1
  source 1..93: mol_type = other DNA
gatcaaaagagtaacagctctcgtacaagctttttgtaatcaaaatagaacgcaaatctcagctgctctacctcaacttaatacctactctac

SEQ ID NO: 2039 - DNA, 104 bp, Jilin partiti-like virus 1
  source 1..104: mol_type = other DNA
cctagagttcgtaatctgtgctctaacttaatctcctcagtcttccggctccccccggatcttctggctaagacgttgctgaatctacgttgataaacaaaaga

SEQ ID NO: 2040 - DNA, 283 bp, Kacheliba Partiti-like virus
  source 1..283: mol_type = other DNA
tccaattgtcgcttcggaatcagtgccatcaaccggttttccaatagataagacaatagataatattgttagaaattattttccaacatacattcagtatattgaaaattaccacagaccacttggaaccaccgacgccacgtttaatgattttaacaaaccacagttcaaatcagaaccattcgcacaagaacgaaaggaacaaatcctaagaatcacgaaacaaaaattaggaattagaaaatataaaccaattcactatgaaggaaccgcatttgcgaag

SEQ ID NO: 2041 - DNA, 114 bp, Kummerowia striata partitivirus
  source 1..114: mol_type = other DNA
agggtggcctcatcgacgtaatcgatggcttccgtgcgccatcacgggtacaagcagggccgttgggttgacatccagcgtagtattctacgatttgtcagtcgtagagcgtga

SEQ ID NO: 2042 - DNA, 76 bp, Kuusamo partiti-like virus
  source 1..76: mol_type = other DNA
gtgttgggtgtgtttggggtcgccttaatccgggcagctcaggacttcgagctgtctacgttgatgagggagattc

SEQ ID NO: 2043 - DNA, 275 bp, Lampyris noctiluca partitivirus-like virus 1
  source 1..275: mol_type = other DNA
cgtttatcggatacgcggatgcgtttagtcaacgtcattacacgagaacaaaatcatactactgcccacaatgggcaactgaggagtctggcgggcttgtccggagccctgtcactttaggtgatatccgtgcagatgttaaaaagtttgccggttccagcacagccaaaatttcaaatgctctgtttaataaagtagtccaagactgcttccatgcatttaaactaccaaaaagggtacgtccaatacatcttaatgatattccacgtacaaca

SEQ ID NO: 2044 - DNA, 29 bp, Lampyris noctiluca partitivirus-like virus 2
  source 1..29: mol_type = other DNA
tgtaaccattatcttttatctttaccaca

SEQ ID NO: 2045 - DNA, 65 bp, Laodelphax striatella associated partitivirus
  source 1..65: mol_type = other DNA
cgcaaaactgtccgaggttttaccgtgatcaacgggttgcccgccttcttcatttcgaaagcgta

SEQ ID NO: 2046 - DNA, 97 bp, Lasiodiplodia ziziphi partitivirus 1
  source 1..97: mol_type = other DNA
gcaaaagagacagacgcccacccgcgcttttctgtaaactctttgactcatttttctgacgtctttctacaaagattacttcccccacccgctcaca

SEQ ID NO: 2047 - DNA, 85 bp, Lentinula edodes partitivirus 2
  source 1..85: mol_type = other DNA
catttgctcaaaccaaactttatccaaatagttaagaacagtttggggtcgtgtgccttgttcgagcttgctatcaaacaacaaa

SEQ ID NO: 2048 - DNA, 45 bp, Lentinula edodes partitivirus 2
  source 1..45: mol_type = other DNA
cccccggctctctagaaacgcttctgcgcccaaaatctacacaca

SEQ ID NO: 2049 - DNA, 65 bp, Lentinula edodes partitivirus 3
  source 1..65: mol_type = other DNA
gagaaaccctcttagttgaattctcgacctctttcgattgattttctcgacttgaagaaaacatc

SEQ ID NO: 2050 - DNA, 60 bp, Lentinula edodes partitivirus 4
  source 1..60: mol_type = other DNA
ccaaagccctcccgcccaggacacttttcttttgagtaaagatcgcaactttgactaaca

SEQ ID NO: 2051 - DNA, 29 bp, Lestijarvi partiti-like virus
  source 1..29: mol_type = other DNA
aagtagaagacttaagcttgggaccagcg

SEQ ID NO: 2052 - DNA, 34 bp, Leuven Partiti-like virus 1
  source 1..34: mol_type = other DNA
tgctattcaggacggcctagatttcttttccggt

SEQ ID NO: 2053 - DNA, 29 bp, Leuven Partiti-like virus 3
  source 1..29: mol_type = other DNA
taatcatttgcggactcgcgcggagcgca

SEQ ID NO: 2054 - DNA, 36 bp, Leuven Partiti-like virus 5
  source 1..36: mol_type = other DNA
caataatctaatataaaatttgtaattacaagcaag

SEQ ID NO: 2055 - DNA, 109 bp, Lichen partiti-like RNA virus 1
  source 1..109: mol_type = other DNA
agaaacgatatctaagaagttatcttagttctacgaaaatcgttactagtgaaatcatacttcacgcataaataaattaacttggaattaaatttattcaagaatcgaa

SEQ ID NO: 2056 - DNA, 99 bp, Lichen partiti-like RNA virus 2
  source 1..99: mol_type = other DNA
gcaaaagaggcgaaactcctacgtttttctcgcaaactctttgactcaattttctacgtcttttctacaaagataactctccccaccctcctacacaac

SEQ ID NO: 2057 - DNA, 59 bp, Lichen partiti-like RNA virus sp.
  source 1..59: mol_type = other DNA
agaaaagttctaccgaaagctctttagacccccatctaaatctacaacgtcttttaaaa

SEQ ID NO: 2058 - DNA, 13 bp, Linepithema humile partiti-like virus 1
  source 1..13: mol_type = other DNA
gcccaatttcatt

SEQ ID NO: 2059 - DNA, 42 bp, Linepithema humile partiti-like virus 1
  source 1..42: mol_type = other DNA
ccccaatttgtttctttgtatacttattaggataatcggaag

SEQ ID NO: 2060 - DNA, 34 bp, Macrophomina phaseolina partitivirus 1
  source 1..34: mol_type = other DNA
gacacacaactttatccttgatagcgatgattcc

SEQ ID NO: 2061 - DNA, 51 bp, Macrophomina phaseolina partitivirus 2
  source 1..51: mol_type = other DNA
ttccgatcttccataccgtttggctttctggtgtttttatcctccttccac

SEQ ID NO: 2062 - DNA, 51 bp, Magnaporthe grisea partitivirus 1
  source 1..51: mol_type = other DNA
gagtcttttaccgtgtcacgggtttatgcctccttcacctctagagccatc

SEQ ID NO: 2063 - DNA, 98 bp, Magnaporthe oryzae partitivirus 1
  source 1..98: mol_type = other DNA
cgtgaaaacccactgatcacatacacgagactttaccttcagtcacaattagcataccgtttggctttctgctaattatcccctagaactcgggcgcg

SEQ ID NO: 2064 - DNA, 98 bp, Magnaporthe oryzae partitivirus 2
  source 1..98: mol_type = other DNA
cgtgaaaacccactgatcacatacacgagactttaccttcagtcacaattagcataccgtttggctttctgctaattatccactagaactcgggagcg

SEQ ID NO: 2065 - DNA, 64 bp, Magnaporthe oryzae partitivirus 3
  source 1..64: mol_type = other DNA
cgcaaaagtccccgagtcttttaccgtgttacgggtttatgcctccttcacctctagagccatc

SEQ ID NO: 2066 - DNA, 77 bp, Maize associated partiti-like virus
  source 1..77: mol_type = other DNA
agctgttggtgtctttccacgctacgtcatagtcagtttaacgtcatagctaaggacgcggtgagcagtttagagtc

SEQ ID NO: 2067 - DNA, 87 bp, Marigold cryptic virus
  source 1..87: mol_type = other DNA
ccctagtttcaggaggcctaaacactgtttaggctattactaaacaaggaggcgaaaaattaattttcactacggaagacttacatt

SEQ ID NO: 2068 - DNA, 73 bp, Melon partitivirus
  source 1..73: mol_type = other DNA
gaaaatcgcactacgtgcgtaaccaaaagggttgaattattttaaatataaaatatatccctccaacactacg

SEQ ID NO: 2069 - DNA, 65 bp, Metarhizium brunneum partitivirus 1
  source 1..65: mol_type = other DNA
cccaatataacatattatatttggagagattgcctctagaaacttttagagcattaatctatcca

SEQ ID NO: 2070 - DNA, 58 bp, Metarhizium majus partitivirus 1
  source 1..58: mol_type = other DNA
cgtaaaaacattgaacctacttacagataagagcacacgagcacagcaagaactattt

SEQ ID NO: 2071 - DNA, 53 bp, Mischke partiti-like virus
  source 1..53: mol_type = other DNA
ctaaacttgataactcacaagatatatgaagtatgagttaaaatggaggattt

SEQ ID NO: 2072 - DNA, 47 bp, Monilinia partitivirus A
  source 1..47: mol_type = other DNA
ccagcctctggtacaacgaaacaattttctacgataaaattctcgaa

SEQ ID NO: 2073 - DNA, 100 bp, Morus alba cryptic virus
  source 1..100: mol_type = other DNA
gagaattatccttaacttgcactaaaaggcgcaagcctaggctagcaagctaaagggtaagatttactaaaattttatatacaacagtgtcgatacgaca

SEQ ID NO: 2074 - DNA, 60 bp, Mycosphaerella partitivirus A
  source 1..60: mol_type = other DNA
catagtcacgattccctgggataaagtcctcgcagaagctgaggcacattttcattcact

SEQ ID NO: 2075 - DNA, 54 bp, Neurospora crassa partitivirus 1
  source 1..54: mol_type = other DNA
aggaatcccccttccctattaactttcccacctaagaattatttacgccccaat

SEQ ID NO: 2076 - DNA, 55 bp, Neurospora discreta partitivirus 1
  source 1..55: mol_type = other DNA
tgcaggaatcccccccccattaaccttcccacctaagaattatttacgccccaat

SEQ ID NO: 2077 - DNA, 51 bp, Neurospora discreta partitivirus 2
  source 1..51: mol_type = other DNA
tcggtataagaatcccctctttcttagaacaacgaataattaaagcttaaa

SEQ ID NO: 2078 - DNA, 84 bp, Neurospora discreta partitivirus 3
  source 1..84: mol_type = other DNA
gtccgcgcccaagtactccaacgtaagcccatataaattaagaattcacattcacctacgctctgctcctcagcaccctacacc

SEQ ID NO: 2079 - DNA, 71 bp, Neurospora discreta partitivirus 4
  source 1..71: mol_type = other DNA
tctctcggcaacccccgacccagagattaacagaatttatttcaaaaatattactcttcactcctgtcaaa

SEQ ID NO: 2080 - DNA, 67 bp, Nigrospora oryzae partitivirus 1
  source 1..67: mol_type = other DNA
cgcaaaaggtctagagccttttaccgtgtaaacgggttttctgcctccttcattctcctggcctaaa

SEQ ID NO: 2081 - DNA, 104 bp, Nigrospora sphaerica partitivirus 1
  source 1..104: mol_type = other DNA
cgtgaaataccacctatcacgtacaagagctaaactaacccaattagcaccgcctgcatatcgtttgagtttctgctggtgacccctacttactaccccttgcc

SEQ ID NO: 2082 - DNA, 104 bp, Norway partiti-like virus 1
  source 1..104: mol_type = other DNA
cctagagttcgtaatctgtgctctaacttaatctcctcagtcttccggttccccccggatcttctggctaagacgttgctgaatctacgttgataaacaaaaga

SEQ ID NO: 2083 - DNA, 95 bp, Panax cryptic virus 1
  source 1..95: mol_type = other DNA
cacgtattttgggcatttaataaacaaagctattaagtgccataaataagcgaaggtagaaaattatttttacacacaccttaccactaataagt

SEQ ID NO: 2084 - DNA, 87 bp, Panax cryptic virus 2
  source 1..87: mol_type = other DNA
ccactctaaacaagtgcaggattacacatcctgcggttaagagctaaagggttttaggaaattatttctactacgagtaacgctagt

SEQ ID NO: 2085 - DNA, 36 bp, Panax cryptic virus 4
  source 1..36: mol_type = other DNA
tttaaggaagcacacagcacatctctcgaaccagag

SEQ ID NO: 2086 - DNA, 877 bp, Partiti-like adriusvirus
  source 1..877: mol_type = other DNA
ccgatctggatactgtgcggggacaatcgtaagttgtagacgaaacttaattagtccggctaggacatgggctgtctgcatgggtaaagtaactggacgctagtcaacgagtgttatgcatacgggcatggaggatgttgggaggtttttcaacccaattcgatgctgtgtcaagtggaagagatcgagccagatatgttatgaccggtttgaacgcggggtagataagactcagtgaaacgctggcatgcggggcctcagggaagcaataatgtaaccatttgtcgacgggactgtcacaggaggcagttgtaagtaacgaagaggtgtgaaagaacgtgcgaacttcagcttcggatagtagaggccgggactagggtgtggaaacatgtgcgaaattcagctataaggcgtcataagaggcgtacgctcacccgaggttgcggtgtccggtgtcacaggaggcatacgctcacccgagtagttatggacagcgttaagtctaggatacagcgaagtctatacggcaccgagggaatacagttaagcagtatttgataaatccgagtctctatttttcgtaatagagtcaccacactgttagacccttcttagggctaacggttctagaatctagtaataggttttgggacaagtcgtatttttaatacgcgtggatgccagaaatggtattcagttcaatttaaactcgagttttgttgagcccccttgtattgggaaatcatactaaaggttcaccgctcctaggtgtgtagtcccccttcattgaagtgcattagggatagggtttatgtaaaatatacccggctttcgcgagtcttaggcaattttaagctaacactactataatattacc

SEQ ID NO: 2087 - DNA, 486 bp, Partiti-like alassinovirus
  source 1..486: mol_type = other DNA
ggaaaatcgtacgtcccttagttgaggaccatctctggcccgacggcaggcaataagcatcgcttatgacaacttaggttccctagctttctaattgcataccatacgcgtcatcgtactgttggaaaatcggtaacccggatgcgaccgttgaatgcatgtacctggcctaatgcaaccagatcatgcaggatcccggttaaagataaatttcttagagaagtgaatttctttagtcgttatttttcatgggtaatggcgtaaatgccattttgttttctgaattctttgaattcaagttctgcccaatgagaaaatgttcctttggtgccaagttcacagactaacttaattagtggtttacgtgtacagtcgtagctatagtgagtcccaacaggagtaacttcccgagaagacttccatcatcgaacaacccaatgttcgcctgtcccggtcgtcaagataactttagcaagttattggata

SEQ ID NO: 2088 - DNA, 516 bp, Partiti-like lacotivirus
  source 1..516: mol_type = other DNA
ccgatctgttagagaagcggcctagtagagctacaagagatactggaggagttatttgattaccatttcaatggcggcgagtcacttgagtgtttttcagatttcttaacgaccaatgagaggagcgtactgatccagcggcagtagggcaaggtatgaggctcattagcttgaatggaacgcgctaagtatggtatcttggttgttgcattttaaatttcatttattgctatccattcacgggatgtttacgtaagtttggggttctaagtgtgtttaaactgtgtacatgaggtaatccgtactatgaagggtgaattaaggtagcgcgacgagggctgttaacgataatatgatctaatgttaatgaggctagacctttaagtatccttgctggcataatattagcggatcaagacgaatgttatgttggggtatgtttttgaactgccttgaaatcgggttctttggctacttcaaaaaacgtatctggaaaaaatagatagcaactaaata

SEQ ID NO: 2089 - DNA, 37 bp, Partitivirus-like 1
  source 1..37: mol_type = other DNA
ttttggcgagataccagtcggtaaagttctcaatgag

SEQ ID NO: 2090 - DNA, 56 bp, Partitivirus-like 3
  source 1..56: mol_type = other DNA
ctgcggatagtaatccaataaagtcgttaccatcagctgagggatatccattagat

SEQ ID NO: 2091 - DNA, 25 bp, Partitivirus-like 5
  source 1..25: mol_type = other DNA
ggctttcaactctgtacgcaattat

SEQ ID NO: 2092 - DNA, 75 bp, Partitivirus-like Culex mosquito virus
  source 1..75: mol_type = other DNA
cagcttgataagatagcttttgagttctcaaagaagnggtttggtgaaggtgtctgtgaaagggtgtgtgagaag

SEQ ID NO: 2093 - DNA, 55 bp, Penicillium aurantiogriseum partitivirus 1
  source 1..55: mol_type = other DNA
ctcgagtcttttaccgtgtcaacgggtttctgtcctcctttcatatcttgagcaa

SEQ ID NO: 2094 - DNA, 54 bp, Penicillium aurantiogriseum partitivirus 1-cp
  source 1..54: mol_type = other DNA
ttctaaggttacacaagtcttaaattggaatttaagcattcatttacgcacata

SEQ ID NO: 2095 - DNA, 58 bp, Penicillium brasilianum partitivirus 1
  source 1..58: mol_type = other DNA
ggagtacgatggcgaaaatgagtcacaacattacaaagaaaccatttatgcgcattcc

SEQ ID NO: 2096 - DNA, 81 bp, Penicillium digitatum partitivirus 1
  source 1..81: mol_type = other DNA
aaaaaaaaaaaaaaaaaaaaaaatcgtacgagatttttctgctattttagctttgtagcctccttcatttcgaaagcctga

SEQ ID NO: 2097 - DNA, 42 bp, Pennypacker partiti-like virus
  source 1..42: mol_type = other DNA
cgttggatttccgacaccgcgagaaaatcattttctttaaac

SEQ ID NO: 2098 - DNA, 100 bp, Persimmon cryptic virus
  source 1..100: mol_type = other DNA
ggaattacccccccactctttgacaaagagcccagagtgaatctgggagtgtcaagaccagggtagaggagcataattctttatttactcaacactatag

SEQ ID NO: 2099 - DNA, 87 bp, Peterman partiti-like virus
  source 1..87: mol_type = other DNA
cacttccgtagggaagggccgtatggcgagtggctccataatgcgggcgttatggtcggccaaattagtcccgtggaggtatgactt

SEQ ID NO: 2100 - DNA, 349 bp, Phoma matteuciicola partitivirus 1
  source 1..349: mol_type = other DNA
aacaccccatcccgtcttaatgttttagcgacacttttgacgatgacactttggtaaagacaatccgtctgtgtgggattatccgttccggtacattaccgaaacgactcgcatttccgattttcggcgcggaatcttacgccaaacgcaacgatacgatccattcgtagatgttgcactgaagcacttcgatcctgaactccgagagagcatcaaaggatacactcgcagccctggcgatgtctgggacgttgctgaaaagttacgcaagtacgattgcgcaactattccgcatgtcacttcagacaaacgcttttctgcagcttacaacttagctgttcgcgaagtt

SEQ ID NO: 2101 - DNA, 62 bp, Phomopsis asparagi partitivirus 1
  source 1..62: mol_type = other DNA
cgcaaaaggtccgaccttttaccgtttaccgggtttttgcctccttcattctcttgagcgta

SEQ ID NO: 2102 - DNA, 45 bp, Phomopsis vexans partitivirus 1
  source 1..45: mol_type = other DNA
gattttcccccctatatatcaaaggggactccaattgtacataca

SEQ ID NO: 2103 - DNA, 17 bp, Phyllosticta citriasiana partitivirus 1
  source 1..17: mol_type = other DNA
atctcaagaacccatac

SEQ ID NO: 2104 - DNA, 132 bp, Picoa juniperi partitivirus 1
  source 1..132: mol_type = other DNA
cccgaattaaagtccaaagaattttttcaaagacgaactatttgaaatccttcacacaacatttgttagttcccgttatccaacaacgcttttcacctgcactcaagaaatttccgcttccccgcgcccatc

SEQ ID NO: 2105 - DNA, 75 bp, Picoa juniperi partitivirus 2
  source 1..75: mol_type = other DNA
ctccccgctctatattgatctcatcgcactccaacaccgattctcaagcccttaacactcttcacacagtccaaa

SEQ ID NO: 2106 - DNA, 26 bp, Picoa juniperi partitivirus 3
  source 1..26: mol_type = other DNA
ctacccgcgaacgacacgagtcaatc

SEQ ID NO: 2107 - DNA, 167 bp, Pistacia cryptic virus
  source 1..167: mol_type = other DNA
ccataaggtgtatcattttccctaggataggttctgtgtagaaaattttatgttgaaagcattcactactacaggatctaaccatgtgcgtaccgtgcaggttcttaaagtgatcaattactccagttcacctgaagtttattcaccttagccccgcgctgtgtacg

SEQ ID NO: 2108 - DNA, 93 bp, Pittosporum cryptic virus-1
  source 1..93: mol_type = other DNA
agaattttcccacgtttctacggacacttagaaacttttaagtgtcgtaaaactgagttgaaaattatcaattttattttcaccgtgaatact

SEQ ID NO: 2109 - DNA, 78 bp, Plasmopara viticola lesion associated Partiti-like 1
  source 1..78: mol_type = other DNA
ttttcttcatgtttgtaaggaatccctttaaacgacaacaaaggtgtaaaagcccaatagaacattggcaataataac

SEQ ID NO: 2110 - DNA, 54 bp, Plasmopara viticola lesion associated Partiti-like 2
  source 1..54: mol_type = other DNA
cactttttacttgggaagaaaatacgtctgcgttcagacaaaattacacgaatc

SEQ ID NO: 2111 - DNA, 55 bp, Plasmopara viticola lesion associated Partitivirus 1
  source 1..55: mol_type = other DNA
ctccgagtcttttggccgttcatcggattttagcctccttcattcctagagcaaa

SEQ ID NO: 2112 - DNA, 255 bp, Plasmopara viticola lesion associated Partitivirus 10
  source 1..255: mol_type = other DNA
ctaggaaaggggtctcatttagttgacgcactccaccttcgtcccgcaaagacggggtcaaccacttctgaggacgttatccctcttcactttgaggaccccaacttacgtgaaatcgctaagtatggggggtactcaacatacagctctaactctaacaccgatcctcaggtgagagagagtctaaagttattcaaccgaaacatctacgaggacatccgtggctacactcgcagaccgcagggcaacttgggc

SEQ ID NO: 2113 - DNA, 25 bp, Plasmopara viticola lesion associated Partitivirus 2
  source 1..25: mol_type = other DNA
cacaatatcatattttccagcacag

SEQ ID NO: 2114 - DNA, 32 bp, Plasmopara viticola lesion associated Partitivirus 3
  source 1..32: mol_type = other DNA
cctcgtgtcaatagaaaaccatcccgtcttca

SEQ ID NO: 2115 - DNA, 37 bp, Plasmopara viticola lesion associated Partitivirus 4
  source 1..37: mol_type = other DNA
attcgctctagctcaataaaaacctcatcccgttttc

SEQ ID NO: 2116 - DNA, 27 bp, Plasmopara viticola lesion associated Partitivirus 5
  source 1..27: mol_type = other DNA
gacagaattaacagctatcgttacaat

SEQ ID NO: 2117 - DNA, 803 bp, Plasmopara viticola lesion associated Partitivirus 6
  source 1..803: mol_type = other DNA
ggctcgtcccaagtcgagcttgcaattgctaattcattcctcttttcccctctccaccctcaagctctaaagcaattatagcaaccatgcagttcgagccgccgatcaagccagccgacatgaccattaagatcactgatggagacaatagcaaccaaagcatcgattcgaatggcatcgtgattggccgctggaagaccggtctctttggtttcaccgattcgatagtgcccaatggcgtcatgtcttgttgctgtcccggtcttgtggtagctcagatatcggctcgtcttggctttatgccattttattacgtgctcagtatctttggagggctttatctagtagcacttattgcggtgacaacccacagtcgctttttcgactttattatatggttgtgcgttgtaatatcggccctctccatgatgcgtttgcgctggcgtattcgatcacttttcagtattcctggatctcatgctgaggacgccgccttcagtttttgctgtggatgctgctcgatcgcacagatggcctcgcatgttgaatcgtatgagccgggcactttttcatttgccccacgcgccacacttcaaggctactcactgaattaaggctttattataaaatagaccatcactatttgcctggaggaagatgggtacgcaagggtacagatataatctctaatactatttacataggcgatttccattcgaaactgaactccgtaactcaatctttgctatactgtcgcaaatttttcagctcttcctacgcttttttcgtaacctctacccact

SEQ ID NO: 2118 - DNA, 86 bp, Plasmopara viticola lesion associated Partitivirus 7
  source 1..86: mol_type = other DNA
aaaaaaacgccgagaattttttactcgaaaagacttcaacctctattccctaaaaatttaattctaaaagattttctacctaccct

SEQ ID NO: 2119 - DNA, 45 bp, Plasmopara viticola lesion associated Partitivirus 8
  source 1..45: mol_type = other DNA
ggcacagttatcctcttttctttcctccttcatttgacagcgaat

SEQ ID NO: 2120 - DNA, 52 bp, Plasmopara viticola lesion associated Partitivirus 9
  source 1..52: mol_type = other DNA
aaattaggttcaacgaaaagaaaatttctaagtcctagaacgactctaaacc

SEQ ID NO: 2121 - DNA, 119 bp, Poaceae Liege partitivirus 1
  source 1..119: mol_type = other DNA
acaattcgagagaggatctggcggtcccattgtccttatcacttggtaaaaccccgcgcagcgagggtttcacacaccaagggtaggttcacaagaacatatttcgcagttactgcacc

SEQ ID NO: 2122 - DNA, 130 bp, Poaceae Liege partitivirus 10
  source 1..130: mol_type = other DNA
aagtacgctcgtttgtcgaagcgtgaccagtctagtgttaggaaagagcaacagcccccctctacgctttccgagaccaaaatagaaatcggatctccgctgccctgcctcaacttgttaccttctctaa

SEQ ID NO: 2123 - DNA, 116 bp, Poaceae Liege partitivirus 11
  source 1..116: mol_type = other DNA
aggtagaccgtattcgacgttttggtcaaaagctcaacagctctcgcccccgctcttcgagatcaaaatagaaatcgaacctcagctgccctgactcaacttgataccttctctac

SEQ ID NO: 2124 - DNA, 147 bp, Poaceae Liege partitivirus 13
  source 1..147: mol_type = other DNA
gcaggaccaggttgagggtgacggtagccggggagttcattgtcggtgagatttcgatagaattcgaagggttcgttgcgttctaggccccccagtctactcgaaagattttatatctccaaccttctaattttctcacagcataaa

SEQ ID NO: 2125 - DNA, 23 bp, Poaceae Liege partitivirus 14
  source 1..23: mol_type = other DNA
acaaggtccagtacttcacaact

SEQ ID NO: 2126 - DNA, 138 bp, Poaceae Liege partitivirus 15
  source 1..138: mol_type = other DNA
gcaggtactctataggacatatactttcaagtgacgcattctagtatttatacagtgttacaactgactatatttgtgcttttcaggtactctataggacatatactttcaagtgacgcattccggtagcagcacaag

SEQ ID NO: 2127 - DNA, 89 bp, Poaceae Liege partitivirus 3
  source 1..89: mol_type = other DNA
ctcccgactccctggcgaaaaccatactcggtctacgaaagctaaagaatttcattcccaatagaacctctattcccaacacacacaac

SEQ ID NO: 2128 - DNA, 119 bp, Poaceae Liege partitivirus 4
  source 1..119: mol_type = other DNA
tctttgggcttcttacaacccagcagagggcatcgaccacgtcatcagagagatgacgccagacgttggatacacccaggacataagagcccaacacccttatatccgttgccccaacc

SEQ ID NO: 2129 - DNA, 91 bp, Poaceae Liege partitivirus 5
  source 1..91: mol_type = other DNA
aaggtagaagcgtggagactctggtgcagttttaaggagtcattttgaagtcaacaagacctcataagatctttgaagcgcactctagaag

SEQ ID NO: 2130 - DNA, 121 bp, Poaceae Liege partitivirus 6
  source 1..121: mol_type = other DNA
tgagtagagacttctgctgggtcaaattctcccggagtttgatggcccccccttccccttctccggtctcaaagctaaagaatctcacccagcagaaatctctactcacactcacccacac

SEQ ID NO: 2131 - DNA, 77 bp, Poaceae Liege partitivirus 7
  source 1..77: mol_type = other DNA
ggttagatccaggatctggattacctctaagctcacgggctaagctaggcttaaagcctacttgcacagtgtttcgc

SEQ ID NO: 2132 - DNA, 25 bp, Poaceae Liege partitivirus 8
  source 1..25: mol_type = other DNA
actagaacatattcgttgccccatc

SEQ ID NO: 2133 - DNA, 31 bp, Poaceae Liege partitivirus 9
  source 1..31: mol_type = other DNA
ttttccaagtccgggacgaaaatgggcagtg

SEQ ID NO: 2134 - DNA, 64 bp, Podosphaera prunicola partitivirus 1
  source 1..64: mol_type = other DNA
cttgagaacctagtgacttctacttaaaaactctttgtaaaaattcacaattttactacttaca

SEQ ID NO: 2135 - DNA, 57 bp, Podosphaera prunicola partitivirus 2
  source 1..57: mol_type = other DNA
ctcgcagatcttataactaagtttttagcttaatatttcaacttgtgaaaatttaac

SEQ ID NO: 2136 - DNA, 89 bp, Podosphaera prunicola partitivirus 3
  source 1..89: mol_type = other DNA
ctgatgctttcaaccgcatcacttgccttttgttcttacattgatacacataagaaattcataggaacaagtattacctcttaatcaca

SEQ ID NO: 2137 - DNA, 78 bp, Podosphaera prunicola partitivirus 4
  source 1..78: mol_type = other DNA
cattaagcccgcccccacgacttatccgaaactacccaacttttctctttttagaacaaatttcaactcactagcaat

SEQ ID NO: 2138 - DNA, 57 bp, Polygonatum partitivirus 1
  source 1..57: mol_type = other DNA
ctaagaaactcatttattagttttcaaaaaactctaaaaacttaaacatctacaact

SEQ ID NO: 2139 - DNA, 92 bp, Polygonatum partitivirus 2
  source 1..92: mol_type = other DNA
ccaccattttatactacttggtgtttatttttacaaacactgcaaggtgggtaattaagaaattattctattatcaggttcttccatctatt

SEQ ID NO: 2140 - DNA, 58 bp, Praha partiti-like virus 1
  source 1..58: mol_type = other DNA
agagagcgaaggatctaggcttcctattttgcccgctttatgcgggctacacgaagtg

SEQ ID NO: 2141 - DNA, 62 bp, Pseudogymnoascus destructans partitivirus 1-pa
  source 1..62: mol_type = other DNA
aaaatactaggtattttaccagctcagctgggttttacagcctccttcatttcgaaagcaag

SEQ ID NO: 2142 - DNA, 297 bp, Puddy partiti-like virus
  source 1..297: mol_type = other DNA
tgttgtcctatggacacgtgaattccctatgggatttaatcatgatggtggtattccatttgactccacaaagtggtgtctaaggagcatcccttagattagagataaaagatgataaccaagtgtgagcaaggtgaaataaaaagcgagccgacatgattgatcgttaacatccgcaattaaggaaaatagctagcgttaagctaacccatcgcgagcctgagagatgtaaagacaaaggggaaccacggccgctcgcctagctagcgagtttcgtagactatagaaaggggaacg

SEQ ID NO: 2143 - DNA, 75 bp, Radish yellow edge virus
  source 1..75: mol_type = other DNA
ggttttattttatttttttttttagagagatcattacagaatattgagttttacaataattctaaaattaatcat

SEQ ID NO: 2144 - DNA, 70 bp, Raphanus sativus cryptic virus 1
  source 1..70: mol_type = other DNA
agaaaaatttacaattttattgtattactttttctaagcttttaccttcttttcctaagaaaaccaagaa

SEQ ID NO: 2145 - DNA, 178 bp, Raphanus sativus cryptic virus 2
  source 1..178: mol_type = other DNA
gataatgatctattagagatcattatcataggttttagttagaaattctaggttgcttgtgtgtgaaaactatagtacctgttgagtatctaaccactacccttctgttttgcaggttaggtaaaatttttaagttttaacgcgaagatttttcaccgtaccagcgcgaaactagaag

SEQ ID NO: 2146 - DNA, 100 bp, Raphanus sativus cryptic virus 3
  source 1..100: mol_type = other DNA
agaattttccccgaaacacataatcgcggaaccaagacttagcagttaaggtcgcaagatttcggtcgtgaaaatcatttcattacagccagtcttcatc

SEQ ID NO: 2147 - DNA, 93 bp, Raphanus sativus cryptic virus 4
  source 1..93: mol_type = other DNA
ggatcaaaagaataacaactcttgacaagctttttgcaatcaaaatagaacgcaaatctcagttgctctatctcaacttgttacctactctaa

SEQ ID NO: 2148 - DNA, 79 bp, Raphanus sativus partitivirus 1
  source 1..79: mol_type = other DNA
gtcaaaatacccagagatctactaaagatttaattctgagtatttacaaacccaacagaaaatctgtttcacacaatat

SEQ ID NO: 2149 - DNA, 34 bp, Red clover cryptic virus 1
  source 1..34: mol_type = other DNA
cagctgctctacctcaacttaatacctactctaa

SEQ ID NO: 2150 - DNA, 43 bp, Red panda associated partiti-like virus
  source 1..43: mol_type = other DNA
cgtacaagttgtgtatggataatccaaggaggtgaccgagata

SEQ ID NO: 2151 - DNA, 79 bp, Red panda associated partitivirus
  source 1..79: mol_type = other DNA
aagaaaaatcactgcatctcgcaaattccaagaattcactgataaattctaatctacctaacctccgtgtcccacaaac

SEQ ID NO: 2152 - DNA, 73 bp, Rhizoctonia fumigata partitivirus
  source 1..73: mol_type = other DNA
gaatcacttggaggaaagccctcgataccaaagctttcaaataaatctcaacaagtattacctcttccctaca

SEQ ID NO: 2153 - DNA, 77 bp, Rhizoctonia oryzae-sativae partitivirus 1
  source 1..77: mol_type = other DNA
gaattactctctccgaaattcctcggtctcgtaatattaaagagtaacaatccctgcagaactctctacacaccaca

SEQ ID NO: 2154 - DNA, 77 bp, Rhizoctonia oryzae-sativae partitivirus 1
  source 1..77: mol_type = other DNA
gaattactctctccgattttcctcggtctcgtaatattaaagagtaacaatccctgcagaactctctacacaccaca

SEQ ID NO: 2155 - DNA, 72 bp, Rhizoctonia oryzae-sativae partitivirus 2
  source 1..72: mol_type = other DNA
aagtaacaactgttatagccctcgatacaaagctatattttgtcacagaattgttcttacctcttacaaaca

SEQ ID NO: 2156 - DNA, 73 bp, Rhizoctonia oryzae-sativae partitivirus 3; identical to SEQ ID NO: 2152
  source 1..73: mol_type = other DNA

SEQ ID NO: 2157 - DNA, 91 bp, Rhizoctonia oryzae-sativae partitivirus 4
  source 1..91: mol_type = other DNA
gaaacagagaaacgatcttcctcgtaactgtttatagcctccaatattaaagctaactcgaagacaacgttaatctcttttacttactgca

SEQ ID NO: 2158 - DNA, 88 bp, Rhizoctonia oryzae-sativae partitivirus 5
  source 1..88: mol_type = other DNA
agaactgtaacggacgaattcctagagagcccaccagcatccgttcaacaacttgaattcgacacacacagacctaaagcaacaagaa

SEQ ID NO: 2159 - DNA, 75 bp, Rhizoctonia oryzae-sativae partitivirus 6
  source 1..75: mol_type = other DNA
agagaaagcccttgagcaaccctctactctttcaatctaaaggaaatccaatccccgttaaatcacaactcaaca

SEQ ID NO: 2160 - DNA, 86 bp, Rhizoctonia solani partitivirus 10
  source 1..86: mol_type = other DNA
ggatcaagtttatcagaaaccagcgaaagcccccaatacaaagctttagcacagaattctatactgtctgagaaaaactactactt

SEQ ID NO: 2161 - DNA, 95 bp, Rhizoctonia solani partitivirus 11
  source 1..95: mol_type = other DNA
ggaacaaagtgagcaacaagtttataactcctcgttctgaacctccaaacgattttcttgcgctgccaacacttactacttactaccctcctaca

SEQ ID NO: 2162 - DNA, 84 bp, Rhizoctonia solani partitivirus 13
  source 1..84: mol_type = other DNA
tctgagacagactatatccacacctgattcttaacctccaaatcatttgtctgaaactcaaattcttattacttactacctaca

SEQ ID NO: 2163 - DNA, 95 bp, Rhizoctonia solani partitivirus 14
  source 1..95: mol_type = other DNA
cgtcgacgaagaccctcgatagaaagtctttacaaacaagtcaacagatattacctgcttagctctcaacgatctacccttcacacacacacaca

SEQ ID NO: 2164 - DNA, 52 bp, Rhizoctonia solani partitivirus 15
  source 1..52: mol_type = other DNA
ggttgctttttctacgctttttgtcgatttttcaaatcttgaaacaacaaca

SEQ ID NO: 2165 - DNA, 71 bp, Rhizoctonia solani partitivirus 2
  source 1..71: mol_type = other DNA
gaagcatcgctattcagctttgttgtaatatcaagcaaagttatcacataaatcgatcttacctctcctca

SEQ ID NO: 2166 - DNA, 28 bp, Rhizoctonia solani partitivirus 433
  source 1..28: mol_type = other DNA
aattttcggaataagttccccgaacatt

SEQ ID NO: 2167 - DNA, 61 bp, Rhizoctonia solani partitivirus 6
  source 1..61: mol_type = other DNA
gaacagacctatatccgagtctcacacctgaacccggaaacttaaagatctatccctcaaa

SEQ ID NO: 2168 - DNA, 57 bp, Rhizoctonia solani partitivirus 7
  source 1..57: mol_type = other DNA
ttgaacaagcctacatagctaagtccgtcaaccttgctacgcgctaaagttctctct

SEQ ID NO: 2169 - DNA, 76 bp, Rhizoctonia solani partitivirus 8
  source 1..76: mol_type = other DNA
agaatttccgtacgaagatacgtttttcacaaacacttctaccgaacagatacttctgtcctcattctacacactt

SEQ ID NO: 2170 - DNA, 62 bp, Rhizoctonia solani partitivirus 9
  source 1..62: mol_type = other DNA
gaacagacctatatccgagtctcacccacataaactcgaaaattaaaagtctatccttcaaa

SEQ ID NO: 2171 - DNA, 92 bp, Rhizoctonia solani partitivirus virus 3
  source 1..92: mol_type = other DNA
cgaaacagagaaacaactcgaatctcaccgtttttcctccaatacttaaagaaatccttcgagcactgttaatctcttttacttactacaca

SEQ ID NO: 2172 - DNA, 78 bp, Rhizoctonia solani partitivirus virus 4
  source 1..78: mol_type = other DNA
gggatccgaagcatcacttgagttcgcccacaataacgaatcgaacttgaaatcaaaattgatcttacctctcacaca

SEQ ID NO: 2173 - DNA, 75 bp, Rhizoctonia solani partitivirus virus 5
  source 1..75: mol_type = other DNA
agagaaagccccgcagaactctgtgctctttcaatctaaaggaaattcaatcccaagcaaatcacgctccaaaca

SEQ ID NO: 2174 - DNA, 112 bp, Rhodiola cryptic virus 1
  source 1..112: mol_type = other DNA
gtctactaagacgtacgatagacttgtcattccttcggggactcaagaaagagttattgacacaaagtctaacaaaccagaaattcaccagaaaatccggtggcaataaacc

SEQ ID NO: 2175 - DNA, 79 bp, Rhodiola cryptic virus 2
  source 1..79: mol_type = other DNA
cggatagcaaaggcagaagccttcgcgttgtctcgtactggacttaaaatatctattttaaatcacgacagtttcgaac

SEQ ID NO: 2176 - DNA, 181 bp, Rose cryptic virus 1
  source 1..181: mol_type = other DNA
ataatgatccaccgaaaaggtgaattatcattatctcagaagtaaaattcttaagtaagtttcgttcaagaaattaacattaagaggtacttctgcacacatctttgtgtaacggttttataagaagcttttctttacagttatctgtattttaactatcttacatccgtgtcacagaggt

SEQ ID NO: 2177 - DNA, 182 bp, Rose cryptic virus 1
  source 1..182: mol_type = other DNA
gataatgatccaccgaaaaggtgaattatcattatctcagaagtaaaattcttaagtaagtttcgttcaagaaattaacattaagaggtacttctgcacacatctttgtgtaacggttttataagaagcttttctttacagttatctgtattttaactatcttacatccgtgtcacagaggt

SEQ ID NO: 2178 - DNA, 97 bp, Rose partitivirus
  source 1..97: mol_type = other DNA
gtcaaatttcaccagtcaccgtgacaacttcacagacaggttttataaaagaagaaaattttcgtcccagcagaatcattctactcacaaacacacc

SEQ ID NO: 2179 - DNA, 75 bp, Rosellinia necatrix partitivirus 10
  source 1..75: mol_type = other DNA
tccgatctccggaactcgtaccccgaacaagacacttaaagctaagattactacttgctacaagtcaccgccaaa

SEQ ID NO: 2180 - DNA, 53 bp, Rosellinia necatrix partitivirus 11
  source 1..53: mol_type = other DNA
gaatcctcgatatagcgactccctcgtctactataaatcgaactctcatcaca

SEQ ID NO: 2181 - DNA, 100 bp, Rosellinia necatrix partitivirus 12
  source 1..100: mol_type = other DNA
cgaaaacttaaccatagctttcgatcttgatttttcaattcggtcaagtccatcaaataacagaaaacaagcctctactacaaagctcaaacttactaca

SEQ ID NO: 2182 - DNA, 71 bp, Rosellinia necatrix partitivirus 13
  source 1..71: mol_type = other DNA
cagaaaaataataccttctgacttattcccgctctatatttatttccagcaactccctctgctctattaac

SEQ ID NO: 2183 - DNA, 86 bp, Rosellinia necatrix partitivirus 14
  source 1..86: mol_type = other DNA
ggttttctctaggaaagtcactgctcacgcactacaccttcagattcagaattaacattcgtccactctcacacaaccgtgtcaca

SEQ ID NO: 2184 - DNA, 88 bp, Rosellinia necatrix partitivirus 15
  source 1..88: mol_type = other DNA
agtatttctctgctccgcccctcgcgcccagaaaaacctttttcaaaactttgaaatttgctaccctactactttcacccaatatatc

SEQ ID NO: 2185 - DNA, 77 bp, Rosellinia necatrix partitivirus 16
  source 1..77: mol_type = other DNA
tgattttcttgcaggcccccccgctcccaagatacttgcccccgcaacagtttaccactgaatcaccttctcacaca

SEQ ID NO: 2186 - DNA, 60 bp, Rosellinia necatrix partitivirus 17
  source 1..60: mol_type = other DNA
gaataaggttctatacgcccgccccgtagcctacgattcacccctccgtttcaattgaca

SEQ ID NO: 2187 - DNA, 88 bp, Rosellinia necatrix partitivirus 18
  source 1..88: mol_type = other DNA
ggttttctctagctcgcgcctcacaagccactactgaatataacaagcctcaaaactttgccactctacaactctcctgcgttttacg

SEQ ID NO: 2188 - DNA, 110 bp, Rosellinia necatrix partitivirus 19
  source 1..110: mol_type = other DNA
gaagactccgacagctctcaaccgctctcgattcccaacttaattgtctgctctccgtcttaagaacttccctacgtcaattttctctcgtacaagctactcttataaat

SEQ ID NO: 2189 - DNA, 47 bp, Rosellinia necatrix partitivirus 20
  source 1..47: mol_type = other DNA
gaatactgactgcaagcacctcgctcgcaaactcaattctgatcaca

SEQ ID NO: 2190 - DNA, 77 bp, Rosellinia necatrix partitivirus 21
  source 1..77: mol_type = other DNA
gacttttcgtatagcccgccccccgcctatactaccacccgtcatctcgtcttatatcaacctcacatctgctcaca

SEQ ID NO: 2191 - DNA, 86 bp, Rosellinia necatrix partitivirus 22
  source 1..86: mol_type = other DNA
agaaccttaacggacgaattgcacgagagcttacactcaaccgttcaacaactacaattcgacacactaggacctaaagccacaag

SEQ ID NO: 2192 - DNA, 42 bp, Rosellinia necatrix partitivirus 23
  source 1..42: mol_type = other DNA
agctcaaagcccacaaagcccttgcatctcaaagcaaacaca

SEQ ID NO: 2193 - DNA, 102 bp, Rosellinia necatrix partitivirus 24
  source 1..102: mol_type = other DNA
tctctcccagctctgttcacaatcctctcatctggtcataaaaatctaaagctctcatctcctctcagtcctatatactgctactcctactcctacctcact

SEQ ID NO: 2194 - DNA, 80 bp, Rosellinia necatrix partitivirus 25
  source 1..80: mol_type = other DNA
ccccgctcaaagtcataaacttctcacaagagtttaatcctcgccccaattcaactgctctcctgctttactcactcgaa

SEQ ID NO: 2195 - DNA, 82 bp, Rosellinia necatrix partitivirus 26
  source 1..82: mol_type = other DNA
gatacctcggtcccaaaccagagttcaacgaaaatctttacttcagactttcactgtatccagaaaacccgctatttttaca

SEQ ID NO: 2196 - DNA, 76 bp, Rosellinia necatrix partitivirus 3
  source 1..76: mol_type = other DNA
caattttctgcaaagagcgctgcttctttaagaacaactccaacagattttacactcgcaacaattgacacacaac

SEQ ID NO: 2197 - DNA, 85 bp, Rosellinia necatrix partitivirus 4
  source 1..85: mol_type = other DNA
agttttatctgcataaaacttcgtctttcgacaagctcccagatattcagaattcacattcgactaccaacacacacctgtcaca

SEQ ID NO: 2198 - DNA, 15 bp, Rosellinia necatrix partitivirus 5
  source 1..15: mol_type = other DNA
agaacttttaatcga

SEQ ID NO: 2199 - DNA, 95 bp, Rosellinia necatrix partitivirus 7
  source 1..95: mol_type = other DNA
agaatcttaacggacgaaattccatagagcctaccagcacccgttcaacaactaaatttcgacacacaagagcctaaagcgatcagttcaccaag

SEQ ID NO: 2200 - DNA, 98 bp, Rosellinia necatrix partitivirus 8
  source 1..98: mol_type = other DNA
aaatattcggtataggaatcccctccctaccaaagctctccgcaaaatcctgctcaaaagctcctgattcccaatactcaagaaatttacgctccaac

SEQ ID NO: 2201 - DNA, 94 bp, Rosellinia necatrix partitivirus 9
  source 1..94: mol_type = other DNA
cgctcttccgatcagttcaaaacaaccgcccaaaatataaagcgtcttgaaagaaaaaccttttcttcctcaactttttttcacttcacacaca

SEQ ID NO: 2202 - DNA, 46 bp, Sacamano partiti-like virus
  source 1..46: mol_type = other DNA
atctaggagaacatctaagcttaaactacgtaataatactgaaatt

SEQ ID NO: 2203 - DNA, 135 bp, Saccharomyces cerevisiae partitivirus 3
  source 1..135: mol_type = other DNA
ggaaaatatgtatgcccatgagtatttcagataccatgttattttccggtccttcaaaaccaaaatttgaacaagggctagtcacccctacttacgactactgaaagtactaatttaagagcaggttacaagaac

SEQ ID NO: 2204 - DNA, 123 bp, Sarcosphaera coronaria partitivirus
  source 1..123: mol_type = other DNA
tctggttttcgtttactacaagcttcgcttacctctcgaactctccaccaagtctcccgccctcacaattaacgcttcgaaagcttctactgcaccaagactaacaatcctctgctctacacc

SEQ ID NO: 2205 - DNA, 84 bp, Scaphoideus titanus-associated partiti-like virus 1
  source 1..84: mol_type = other DNA
agggccttgtggctctatttatttctatttgcaacatcatcatttgcaacggattaatatacttttctgtttcagattgtgtaa

SEQ ID NO: 2206 - DNA, 92 bp, Sclerotinia sclerotiorum partitivirus 1
  source 1..92: mol_type = other DNA
agaaaacttgcaacgcgcccgcagactttctacaagcgccccttcaagcagatttattctgaccctattctacacaactctctcccgtcaac

SEQ ID NO: 2207 - DNA, 85 bp, Sclerotinia sclerotiorum partitivirus S
  source 1..85: mol_type = other DNA
agattaattatcttagtccactttctaagttcaacgaaaattaaatcaaaaagctcttaaccacacagatcttttaaaactaaca

SEQ ID NO: 2208 - DNA, 77 bp, Setosphaeria turcica partitivirus 1
  source 1..77: mol_type = other DNA
gaattactctctccgaaaattctcggtctcgtaatattaaagagtatcaatccctgcagaacaatctacacaacaca

SEQ ID NO: 2209 - DNA, 27 bp, Sichuan mosquito associated partiti-like virus
  source 1..27: mol_type = other DNA
aaaacaagctactagtcggttttaaat

SEQ ID NO: 2210 - DNA, 34 bp, Sichuan mosquito associated partitivirus
  source 1..34: mol_type = other DNA
cttgaatataaagaaaattatcgaacaaagcatt

SEQ ID NO: 2211 - DNA, 166 bp, signal crayfish associated partiti-like virus 1
  source 1..166: mol_type = other DNA
acacggtctgccgtagagcgccgcggttcttgcggcgtcccgcgtgccaccgccggtccgtgaaacatgcgagggaggtaactgaggcagcgcattgctaggaatgcggactgggatttgcccagattagaccgtgcgtttgatattgtgtttgctgaattggaaa

SEQ ID NO: 2212 - DNA, 105 bp, Sinapis alba cryptic virus 1
  source 1..105: mol_type = other DNA
agaattttcccctgataaattatttatccgtgttgaacttacagcttcacggcttatatcaggttggattattatattcaatacactcatctgtttacatacaag

SEQ ID NO: 2213 - DNA, 67 bp, Sodiomyces alkalinus partitivirus 1
  source 1..67: mol_type = other DNA
gaaaatattcggtatagagatcccctccccttgatactctccccacgaataattaaagcatttcgca

SEQ ID NO: 2214 - DNA, 71 bp, Sophora japonica powdery mildew-associated partitivirus
  source 1..71: mol_type = other DNA
gagaataacctctcgcagatgttataactaagtatttaaatttaatatttcaactcaagaaaatttatctt

SEQ ID NO: 2215 - DNA, 126 bp, Soybean thrips partiti-like virus 1
  source 1..126: mol_type = other DNA
tggaccacgaaaaccaattatcaattttttccaacaacaagtaaataaaagcgagataataaaacaatttaacaaaagaaagtaaaaccaatcagtctttttcaagactaaattaaaattttcaaa

SEQ ID NO: 2216 - DNA, 10 bp, Soybean thrips partiti-like virus 2
  source 1..10: mol_type = other DNA
tgtataaatc

SEQ ID NO: 2217 - DNA, 10 bp, Soybean thrips partiti-like virus 4
  source 1..10: mol_type = other DNA
tgatgcggcg

SEQ ID NO: 2218 - DNA, 10 bp, Soybean thrips partiti-like virus 7
  source 1..10: mol_type = other DNA
cacccactat

SEQ ID NO: 2219 - DNA, 52 bp, Soybean thrips partiti-like virus 8
  source 1..52: mol_type = other DNA
gtgaaatataatttcattcaaagcgattaaaatcagattacaatttaaagat

SEQ ID NO: 2220 - DNA, 87 bp, Soybean thrips partiti-like virus 9
  source 1..87: mol_type = other DNA
gaaataaataaattaaatataaacgagagattatatatagtgaagtggttcagacccacaccttaactggttatagtaagacgccgg

SEQ ID NO: 2221 - DNA, 80 bp, Spinach cryptic virus 1; identical to SEQ ID NO: 696
  source 1..80: mol_type = other DNA

SEQ ID NO: 2222 - DNA, 84 bp, Steinernema ceratophorum partiti-like virus 1
  source 1..84: mol_type = other DNA
gattaaaatatatagagaaccctctccctatacgatttttaaaatcaatattaaatacccttttttacacgaccgaccttgaat

SEQ ID NO: 2223 - DNA, 83 bp, String-of-pearls partitivirus
  source 1..83: mol_type = other DNA
ccgggattgttagaaatcaatacaaccggtcttacaaaattaaagaattttagtcccagcagattatatctactaacaacaca

SEQ ID NO: 2224 - DNA, 51 bp, Talaromyces marneffei partitivirus-1
  source 1..51: mol_type = other DNA
cgcaaaaatcttagagatttttacccgtgttccggggtttgtgccttcttc

SEQ ID NO: 2225 - DNA, 109 bp, Terfezia claveryi partitivirus 1
  source 1..109: mol_type = other DNA
agaaattcgactgccccaccgtaaacatcgacttccttcctctatacgctgctatctctaaccattttagccaacccccttctcttcaacactcttctcacagtacaac

SEQ ID NO: 2226 - DNA, 226 bp, Thedrake partiti-like virus
  source 1..226: mol_type = other DNA
gtgtttctttacgaaactctcagttaagtgtatcctaagtataggatgaaacaagacagggacattactaccattggtaggaaagttcgaaagccacattttgtcgtgtggaacagagggaagattattgggttattttctcctcagatcaggtctaaattttattgtaggttttaagctcacggtggaccacaaaacccaatcagcgtagaccatcataggagga

SEQ ID NO: 2227 - DNA, 35 bp, Thelebolus microsporus partitivirus 1
  source 1..35: mol_type = other DNA
cagtctatttccttcttcatattgaaaagcactac

SEQ ID NO: 2228 - DNA, 12 bp, Tomato associated partiti-like virus 1
  source 1..12: mol_type = other DNA
ctaattaggacg

SEQ ID NO: 2229 - DNA, 154 bp, Trichoderma atroviride partitivirus 1
  source 1..154: mol_type = other DNA
agacactaagaacttgattcaagggtaggtgtagtgaaagacaacactgactaggatagctggttttctgcgcggacaaattgcacagaatctacacagaaattccgttcaacaattacaatttgacacacacagacctaaagcaacaagaaca

SEQ ID NO: 2230 - DNA, 83 bp, Trichoderma citrinoviride partitivirus 1
  source 1..83: mol_type = other DNA
gcccccctgtgcgctttattccctgcttcaccgctcgtcctagcccttttctaccgcttcacacccgcccctccgtaaccaaa

SEQ ID NO: 2231 - DNA, 68 bp, Trichoderma harzianum partitivirus 1
  source 1..68: mol_type = other DNA
cgggaacaaggccccattgttaagacttatgtctttctcaatccctatagttttccctgactcccaac

SEQ ID NO: 2232 - DNA, 69 bp, Trichoderma harzianum partitivirus 2
  source 1..69: mol_type = other DNA
ctcaggcagagattccctcatcggagcacgttgtgttgcttcgattcataggtttctgtgaactctctg

SEQ ID NO: 2233 - DNA, 54 bp, Trichoderma harzianum partitivirus 3
  source 1..54: mol_type = other DNA
ccgagcttttactcgtgtacacgaggtttttgccttcttctttcctagagcgaa

SEQ ID NO: 2234 - DNA, 73 bp, Turkana Partiti-like virus 1
  source 1..73: mol_type = other DNA
aaatatttgtaccccctaagtttgataaaaaatatcaaagcgaaaatttaaaaacattaaaagcgaattaaca

SEQ ID NO: 2235 - DNA, 324 bp, uncultured partitivirus
  source 1..324: mol_type = other DNA
caggggagataaggctcactcgaatccctcgattccgagaaatccctcaaagcctaatctcccccgagcaccgaacttcactcaaagttccccccctgctcaccccctcgcaatggatttacatcacaaagctcttcgcgctctcaacatcgaccccgagaaagatcctggactcgtccacatctacagcgaaaagcccgcccgccattttcaggtcatccctactacaaagagaattatcaggacctcgtcctcgacgctttaaatagcactctctacgcagaagacctcgataccgttattaacggatattacagaagtccc

SEQ ID NO: 2236 - DNA, 64 bp, Ustilaginoidea virens partitivirus
  source 1..64: mol_type = other DNA
cgcaaaagacctcgagtcttttaccgtttaccgggtttatgcctccttcacttcttgagcgaaa

SEQ ID NO: 2237 - DNA, 42 bp, Ustilaginoidea virens partitivirus 2
  source 1..42: mol_type = other DNA
gttatagaccccgttgtctatcgcacctcatcccggtactaa

SEQ ID NO: 2238 - DNA, 58 bp, Ustilaginoidea virens partitivirus 3
  source 1..58: mol_type = other DNA
cattattagtcagtgtcccgaaaacctgacttttaaaacccttcccctccccagcagc

SEQ ID NO: 2239 - DNA, 247 bp, Varnsen partiti-like virus
  source 1..247: mol_type = other DNA
gctttgttgtggatgtgaattatctgaggcgggcatcgacagccaacgatatgcacacgatacagtcttgatggctaatggttagatattccattagaaactctgcgaaatcactcaatgaggtcgatggttgcatgtcaatggctagactcgagaggaagtcaccgaataaatatttttttttttattttttcgttttgatgtctgacgacttcgttccagattgaacaaaaacacatgcatcaag

SEQ ID NO: 2240 - DNA, 36 bp, Verticillium albo-atrum partitivirus-1
  source 1..36: mol_type = other DNA
tggaatcttttccttctttaaacgattcaacacgtc

SEQ ID NO: 2241 - DNA, 62 bp, Verticillium dahliae partitivirus 1
  source 1..62: mol_type = other DNA
cgcaaaagtctagcgcttttaccgtgtcaacgggtttatgcctccttcattccttgagcgaa

SEQ ID NO: 2242 - DNA, 106 bp, Vespa velutina associated partiti-like virus 1
  source 1..106: mol_type = other DNA
cggcccctttttgaatatttgagaaggaacgaaattttaattgtgaattaatgtgaagtggtggccccacattttaaatttgaactcactgttaaaagagtataaa

SEQ ID NO: 2243 - DNA, 63 bp, Vespa velutina associated partiti-like virus 2
  source 1..63: mol_type = other DNA
cgtcaatctacntgcttatcagttgagcgttgttaagactcgcttacgatctaggctttcaca

SEQ ID NO: 2244 - DNA, 30 bp, Vespa velutina associated partiti-like virus 3
  source 1..30: mol_type = other DNA
ctttccgtcgggggaaamwgtttccacatt

SEQ ID NO: 2245 - DNA, 196 bp, Vespa velutina partiti-like virus 2
  source 1..196: mol_type = other DNA
aaatgataaggtcgtaaattatgaaatatatcagaaaaataatgctgaacttcatttaaggcttgctgatagatagccttattaagccggacagcgcgtggcgcataaaacttccgaagtattggttttggatcacgaaaaccacttctgaacttggtaggtcgctagatgaacgttggtctgcgtacgcagccac

SEQ ID NO: 2246 - DNA, 11 bp, Vespula vulgaris Partiti-like virus 1
  source 1..11: mol_type = other DNA
tgatttcagcc

SEQ ID NO: 2247 - DNA, 39 bp, Vespula vulgaris Partiti-like virus 2
  source 1..39: mol_type = other DNA
ttgaaacttcatgattaatcgaaaattatttcggacagg

SEQ ID NO: 2248 - DNA, 98 bp, Vicia faba partitivirus 1
  source 1..98: mol_type = other DNA
ggtcaaattctcccggatttcttagaacttcggtcttacaactttaaagaattttcgccccagcagaattactctacttataacacacacacacaacg

SEQ ID NO: 2249 - DNA, 91 bp, Vitis cryptic virus
  source 1..91: mol_type = other DNA
cataaggagagcacaatcaaaacaaattggtgctcgttcgttagcaggtttgagaaattattttcacactacgactgtatagtattaaact

SEQ ID NO: 2250 - DNA, 166 bp, Whatley partiti-like virus
  source 1..166: mol_type = other DNA
taggtaatttattaggttctgtgtcaactatgacatccgcttgttaaagcatcttcctgcttaggtcagtttagtggcagtcattagccaaacacagtcgataaagagtctcctggctttaccgattggtgccgtaagcacacgacttctaaggagatgaaggtta

SEQ ID NO: 2251 - DNA, 80 bp, White campion partitivirus
  source 1..80: mol_type = other DNA
aacagccttcgttacgcttttcactatcaaaatagaacgtgaatctcggctgctctatctcaacttgatacttactctac

SEQ ID NO: 2252 - DNA, 12 bp, Xanthi partiti-like virus
  source 1..12: mol_type = other DNA
aatgtagacata

SEQ ID NO: 2253 - DNA, 42 bp, Xiaogan partiti-like virus 1
  source 1..42: mol_type = other DNA
cagaacggtacaacgaaacctttatctacgttattcaacgat

SEQ ID NO: 2254 - DNA, 68 bp, Yarrowia partitivirus A
  source 1..68: mol_type = other DNA
gtctagctccttgttagctgcttcttatttagagctatggctagtctcgtcgtcttctctcaaacacc

SEQ ID NO: 2255 - DNA, 74 bp, Yellowtail scad partiti-like virus
  source 1..74: mol_type = other DNA
tgcttaattcggtagtgagaacgggaacgtaacaaaaaaaattttaaataaaagaaattggtgttaatttcgtt

SEQ ID NO: 2256 - DNA, 64 bp, Beet cryptic virus 1
  source 1..64: mol_type = other DNA
aagccgatcgctttgtttgttttaaagaaaaaaaaaaaaaaaaaaaaaacaaatcaatttgtcc

SEQ ID NO: 2257 - DNA, 52 bp, Bondarzewia berkeleyi partitivirus 1
  source 1..52: mol_type = other DNA
gtttcttggttatgtacaactcttcatgaaataaaaaaaaaaaaaaaaaact

SEQ ID NO: 2258 - DNA, 26 bp, Carrot cryptic virus
  source 1..26: mol_type = other DNA
agccgatcgctttgtttgttattttc

SEQ ID NO: 2259 - DNA, 66 bp, Cherry chlorotic rusty spot associated partitivirus
  source 1..66: mol_type = other DNA
tactttgagcaattgcaattatacaaaattccaaaaaaaaaaaaaatccaaaaaaaaaaaaaaaag

SEQ ID NO: 2260 - DNA, 112 bp, Chondrostereum purpureum cryptic virus 1
  source 1..112: mol_type = other DNA
cgtcagtttttgtttcggttcgtgtactgtgtattcctaacggaacacaacagacctcaaaactattatgaaaataattaaaattaaaaaaaaaaaaaaaccaaaacaaaaa

SEQ ID NO: 2261 - DNA, 180 bp, Enontekio alphapartitivirus 1
  source 1..180: mol_type = other DNA
aatttattagttttagaaaactcgtttcttctttgtggaagttttagaaaattattcccgataaataaaaatgctaatctactctacatcggaaacgatccggctaaagccccgcaggtgcatcccagctacctgacgtaccgccacgttaatccagtcatcatgcgatgaaaactgcac

SEQ ID NO: 2262 - DNA, 342 bp, Enontekio alphapartitivirus 2
  source 1..342: mol_type = other DNA
attctgaggcaggaatcttgttccacaaaagtgtactatcttcagtttttcttttattcttagattttgttctaataatttctttgcttgtgtatagtaaatactttctggttgaggtatctcatatggttgatgtctacgaaaatcgttgtatattgcgttcaatgatatttcagatctgtgatatgttttaaggatatcgtcagtcctggaatcaccgattacgtatcggatgatacgttctgcaatgcgttctggatttcggtttacaattggtatcgaaaacttgtcactagagttctctctaccaattgtaaacccaaatccaaacacacccaacac

SEQ ID NO: 2263 - DNA, 428 bp, Hanko alphapartitivirus 1
  source 1..428: mol_type = other DNA
acgtgtgccagtgaaatgtactgtttttagcttttcagtgacattgattgcattctttagttgatttaatgctttaatgtatgctggatctttacatttaggtaatccatgcgaattgttacgatataagtcagaaattaaacttttagtgtttacaagtcctcttttaaaacttgagagtatttgattggctttatttgagcccaatatctcggttatagaagacaatgcgtattgttcaggtttcgtgttatttgttgggatgttaaatcctctagtttcgtttttagtcgaaatacgtaaaatattattaaaattatggggagagctaatgactacaactataattcaaataatattttacgtatttcgactaaaacgaaactagaggatttaacatcccaacaaataacacgaaacctgaacaa

SEQ ID NO: 2264 - DNA, 78 bp, Hanko alphapartitivirus 2
  source 1..78: mol_type = other DNA
gatttgtgcgataatccagggtttggggactccgaatatgcagcgagttcttggggctgaggtggaaacggtcagaga

SEQ ID NO: 2265 - DNA, 68 bp, Hanko alphapartitivirus 3
  source 1..68: mol_type = other DNA
tgtttgttaatgagaaattcgaaaatctcaaataaaaataaattataaaaaaaaaagccaaacacacc

SEQ ID NO: 2266 - DNA, 40 bp, Helicobasidium mompa partitivirus V70
  source 1..40: mol_type = other DNA
agttactttacaacagtccaagtatttactgcttatgctt

SEQ ID NO: 2267 - DNA, 52 bp, Helicobasidium mompa partitivirus V70
  source 1..52: mol_type = other DNA
gcacgcatctccagacccttattctttctacccaaaaaaaaaaaaaaaaagt

SEQ ID NO: 2268 - DNA, 64 bp, Heterobasidion partitivirus 1
  source 1..64: mol_type = other DNA
ttgctcaattttaaatttcaaaaccaaaaaaattgaaaaaaaaaaaaaaatttaaaaaaaaccc

SEQ ID NO: 2269 - DNA, 54 bp, Heterobasidion partitivirus 12
  source 1..54: mol_type = other DNA
tctcccagtttctcttgactgtaaaacacaaaaaagaaaaaaaaaaaaaattac

SEQ ID NO: 2270 - DNA, 49 bp, Heterobasidion partitivirus 13
  source 1..49: mol_type = other DNA
gtaatctatgtactcccttaacccaacatgaaaaaaaaaaaaaaattac

SEQ ID NO: 2271 - DNA, 58 bp, Heterobasidion partitivirus 15
  source 1..58: mol_type = other DNA
accgttttcattcttaatttatcaaagaaaaacacaaaaaaaaaaaaaaaaaaattac

SEQ ID NO: 2272 - DNA, 87 bp, Heterobasidion partitivirus 20
  source 1..87: mol_type = other DNA
agtctaaggtcttagacgttttgtttacagcattatgcccattcaccttcttatttattaagaaaacgaaaaaaaaacaaaaaaaaa

SEQ ID NO: 2273 - DNA, 58 bp, Heterobasidion partitivirus 3
  source 1..58: mol_type = other DNA
tccgctgatctcgaaagatccaacctaaaaaattgaaaaaaaaaaaaaaaaaaaatac

SEQ ID NO: 2274 - DNA, 130 bp, Hygrophorus penarioides partitivirus 1
  source 1..130: mol_type = other DNA
ttacagtttgggattttttctgcatttatttttgtaagttaaccttacttacgactttaattttttatcttttataaaagaaaaaaaaaaaaaaaaaaaaaaaaaaaaaaaaaaaaaaaaaaaaaaaaaa

SEQ ID NO: 2275 - DNA, 94 bp, Kalajoki alphapartitivirus
  source 1..94: mol_type = other DNA
gcgttgggtagttaagaatcagtttcggagctttttggtaggctttgattgggaaggcgctaaacttgggctagaaaaaaaaaaccaaacacac

SEQ ID NO: 2276 - DNA, 243 bp, Kuusamo alphapartitivirus
  source 1..243: mol_type = other DNA
tgtcccatttgcatttgaaaacttatcgaaagagcaatacttgcgtaaatttgcttcacaaatttgtgaaggccaatcaaacggccgacggacttaggacggaggtaaaatttcccttgtacgtgctctgctctttagcggatattcggggccggaaggcgagagaccaggtgtactaaatggtcgaagaatcaaacaatggtttttgattgatgttacttatggtttcatcgaaaaaaaaaa

SEQ ID NO: 2277 - DNA, 62 bp, Medicago sativa alphapartitivirus 1
  source 1..62: mol_type = other DNA
gtttaagacgttattttttttcgtcttttctcttaaaaaaaaaaaaaaaaaaaaaaaaaaaa

SEQ ID NO: 2278 - DNA, 56 bp, Medicago sativa alphapartitivirus 2
  source 1..56: mol_type = other DNA
gtttaagacgttatttaggcgtcaccttaagttaataaaataaaaggaaaccccaa

SEQ ID NO: 2279 - DNA, 268 bp, Palkane alphapartitivirus 1
  source 1..268: mol_type = other DNA
agtcccacactctatactttgccggattacgaatactcgcgtgatttttgcttcacgaatttgtgaaggctaacaaccgaaggactcaggaatgagcaaaaataatcacccttgtatgcgtcatgccgtattcacggactattcggggctagtaatagcgagagagcaggtgtagtaaatcgctcgaagaatcaaagaatggtttttgatgatgtgtttacctataggtttcacaaaaaaaaaaaaaacgacaccaaacacacccaac

SEQ ID NO: 2280 - DNA, 271 bp, Palkane alphapartitivirus 2
  source 1..271: mol_type = other DNA
cgtcccacactctacttatttactgaaagacgactactcgcgtgatttttcccctttgaatttgtgaaggaaaccccgaaggactcaggataatgaggaaattttatcacccttgtacgcgtcatgcccctctaggggaagttattcgggctctagcaatagaggagagaactggtgtattaaaatgttcgaagaatcaaagaatggtttttgatgatgtgttcttaacgatcacaaaaaaaaaaaaacgacaaccaaacacacccaacac

SEQ ID NO: 2281 - DNA, 70 bp, Paris alphapartitivirus
  source 1..70: mol_type = other DNA
ggttttaagacgaccaatttattttggcgttctaattcttcctgataaaagaacgaaaaataaaaaaaac

SEQ ID NO: 2282 - DNA, 87 bp, Pear alphapartitivirus
  source 1..87: mol_type = other DNA
gtttaagacgttatttaggcgtctctcctcttaagtaaaataaaaactaaaaaaaggaaaaagcctaaataaaaataaattataaag

SEQ ID NO: 2283 - DNA, 60 bp, Rhizoctonia solani partitivirus SM03
  source 1..60: mol_type = other DNA
ttgtgtgatttctgttttctccccctcttaacaaaaaaaagaaaaaaaaaaaaaaattgc

SEQ ID NO: 2284 - DNA, 90 bp, Rosellinia necatrix partitivirus 2
  source 1..90: mol_type = other DNA
aatgagacgagttttatgtttaattttaacatatgtttctaaaacaaaaaaaaaaaaaaaaaaaaaacaaaaaacccaaaaaaaaaatgt

SEQ ID NO: 2285 - DNA, 102 bp, Sclerotinia sclerotiorum alphapartitivirus 1
  source 1..102: mol_type = other DNA
agtctaatgtcttagacatattgtttttagttttaacagacttcttactatgtccattctgtcatttattaagaaaaaacaaaaaaaacaaaaaaaaaagat

SEQ ID NO: 2286 - DNA, 86 bp, Trichoderma gamsii alphapartitivirus 1
  source 1..86: mol_type = other DNA
agtctaaggtcttagacgttttgttttaaagcaattcgtttttttcatcctacaaaaaaaagaaataaactaaaacaaaaaaaaac

SEQ ID NO: 2287 - DNA, 50 bp, Tulasnella partitivirus 1
  source 1..50: mol_type = other DNA
agatgacgtgtttattaatttcttcttttcttttattcaaatttgaaaac

SEQ ID NO: 2288 - DNA, 108 bp, Tulasnella partitivirus 2
  source 1..108: mol_type = other DNA
ggagtgagtttcttattgagcaggaatttttttcagtctcacacccttattatgatttgagagccaattaatcaaatctttatttataataagggtgtgagactgaaa

SEQ ID NO: 2289 - DNA, 57 bp, Tulasnella partitivirus 3
  source 1..57: mol_type = other DNA
gattagaatattgttaatttttgttaaaaaaaaaaaaaattttaaaaaaaactcaac

SEQ ID NO: 2290 - DNA, 69 bp, Vicia cryptic virus
  source 1..69: mol_type = other DNA
agccgatcgctttgtttgtttctttttaattaaaataaaaaaaaaaaaaaaaaacaaaaaaaaattgcc

SEQ ID NO: 2291 - DNA, 30 bp, White clover cryptic virus 1
  source 1..30: mol_type = other DNA
aaagccgatcgctttgtttgtttctttttt

SEQ ID NO: 2292 - DNA, 106 bp, Betapartitivirus sp.
  source 1..106: mol_type = other DNA
gatttccgtcgttcttactttctttaagtttgttaatattgtagtcctcaatataaaatacaaaaaaaaaaaataagaaaactaaaaaacctaaaaaaatcgaccc

SEQ ID NO: 2293 - DNA, 74 bp, Cannabis cryptic virus
  source 1..74: mol_type = other DNA
ttttttatcttcgtttttaaattttcgttgattttgcaaatttatataaaaaaaaaaaaaaaaaaaaaaaaaaa

SEQ ID NO: 2294 - DNA, 271 bp, Ceratocystis resinifera virus 1
  source 1..271: mol_type = other DNA
gagaccagataagataacacttgctgagtttagactactgtcaacttagctcctagttacattgatctaggtactttaggcgtaaacaaatcccctcgtttacgaaaaaaaaaaaaaaaagtcgacatcgatacgcgtggcccccaaaccctgagagaccagataagataacacttgctgagtttagactactgtcaacttagctcctagttacattgatctaggtactttaggcgtaaacaaaaaaaaagaaaaaaaaaaaagaaaaaaa

SEQ ID NO: 2295 - DNA, 95 bp, Crimson clover cryptic virus 2
  source 1..95: mol_type = other DNA
tgattttgtgcttgtaatatagcataaagtactttacttgctaatttttaaattaaaaaaaaaaaaaaaaacactaaaaaatcaaaaaaataccc

SEQ ID NO: 2296 - DNA, 90 bp, Dill cryptic virus 2
  source 1..90: mol_type = other DNA
tttccttgtgcgttaatacccgcatataatttctcgtgattttatatataaaacaataaaaaaccccaaaaaaaatcaaaaaaacgcccc

SEQ ID NO: 2297 - DNA, 42 bp, Enontekio betapartitivirus 1
  source 1..42: mol_type = other DNA
tttataggttagagtgggggggtttaactctaacccaaacac

SEQ ID NO: 2298 - DNA, 53 bp, Enontekio betapartitivirus 2
  source 1..53: mol_type = other DNA
tgtgaagggtagttagtagttaaggcttaatcgcaacaaactccaaacacacc

SEQ ID NO: 2299 - DNA, 119 bp, Erysiphe necator associated betapartitivirus 1
  source 1..119: mol_type = other DNA
gaatcactctcgttaattttacgattatcgtttggttttttagtttcttttctttagtcttaagactttttgcttttatataaaacaaaatattaaaaaaattttaaaaccctaaaaac

SEQ ID NO: 2300 - DNA, 38 bp, Erysiphe necator associated betapartitivirus 2
  source 1..38: mol_type = other DNA
tttacagttttactatagtcttctgttttcgatttttt

SEQ ID NO: 2301 - DNA, 69 bp, Heterobasidion partitivirus 17
  source 1..69: mol_type = other DNA
tctgttcaatttctttattttcttaaaaaaaaaaaaaaaaaaagaaaaaaaaaaaaaaaaaaatgactc

SEQ ID NO: 2302 - DNA, 57 bp, Heterobasidion partitivirus 2
  source 1..57: mol_type = other DNA
ttgctagtccatgcctccaccctcaaaaaaaaaaaaaaaaaaaaaaaaaaaaaaatc

SEQ ID NO: 2303 - DNA, 59 bp, Heterobasidion partitivirus 7
  source 1..59: mol_type = other DNA
tttagttccgatctttttcgacaaaataaaaaaaaaaaaaaaaaaaaaaaaaaaaaatc

SEQ ID NO: 2304 - DNA, 90 bp, Heterobasidion partitivirus 8
  source 1..90: mol_type = other DNA
agttttgctatgagaatagttatctttgcttctttttactccacaaaatgaaaaaaaatcaaaaaaataataaaactcaaaaaaaaattc

SEQ ID NO: 2305 - DNA, 66 bp, Heterobasidion partitivirus P
  source 1..66: mol_type = other DNA
aagctacgttcgtccgtttcaaacaagaaacgaaaaaaaaaaaaataaaaaaaaaaaaaaaaaatc

SEQ ID NO: 2306 - DNA, 81 bp, Hop trefoil cryptic virus 2; identical to SEQ ID NO: 703
  source 1..81: mol_type = other DNA

SEQ ID NO: 2307 - DNA, 210 bp, Kalajoki betapartitivirus
  source 1..210: mol_type = other DNA
gtgatcgcctaaacgggctgtcatttgcctcattaaaactgaccctcatgacaaaacccaaaaaggcatcacgttaagagcgtgcccccgaaccctaacaatatagggggttgacacttagttacgttatagatgtaagtttacttactgacataatggggctttgggacttaggaaatgtacctctgagtattttagataaaaataaaa

SEQ ID NO: 2308 - DNA, 157 bp, Lentinula edodes partitivirus 1
  source 1..157: mol_type = other DNA
agaaaacagtccctttgttttcttgtttcgttttgatacaacggatctatgcgatcaggtttgcgccttcatgtgcaaattagattagctgatccagacgaatctccttttgcaacacatgaaccgcgaagaagcgaatgcctctcgcaatcataac

SEQ ID NO: 2309 - DNA, 96 bp, Quinoa-associated betapartitivirus 1
  source 1..96: mol_type = other DNA
ttttaagatgattaatccccattttacatacactacaagttacataacaccaacccttatgtaagctctaattgcccacaaaaaaaaatcaaaaac

SEQ ID NO: 2310 - DNA, 85 bp, Quinoa-associated betapartitivirus 2
  source 1..85: mol_type = other DNA
acgtttaccgtgattttttttgtgtttaataaacatgacaaaaatttcgtttttttgattcccccaaaaaaaaaccaaaaaaaat

SEQ ID NO: 2311 - DNA, 86 bp, Red clover cryptic virus 2
  source 1..86: mol_type = other DNA
ttattttgtgctttacaagcatagaaatttttctcgctaatttaaattaaaataaaacacaaaaaaaaaatcaaaataaatccccc

SEQ ID NO: 2312 - DNA, 112 bp, Rosellinia necatrix partitivirus 6
  source 1..112: mol_type = other DNA
tatttccgtaccttttgtatgttttaacacaatatactttatgtttacgcttttataaaagaaaaaaacaaaaaaaaaaaatttttaaaaacaacaaaaaataaaaaacact

SEQ ID NO: 2313 - DNA, 94 bp, Rosellinia necatrix virus 1
  source 1..94: mol_type = other DNA
actgtcaacccaatggttttactttcccgtttttgtttatttttatgaacgcaagttcatttaattatttactttacacgctttgtttaatcct

SEQ ID NO: 2314 - DNA, 86 bp, White clover cryptic virus 2
  source 1..86: mol_type = other DNA
ttattttgtgctttataagcatagaaatttttctcgctaatttaaattaaaataaaacacaaaaaaaaaaatcaaaataaatcccc

SEQ ID NO: 2315 - DNA, 48 bp, Beet cryptic virus 2
  source 1..48: mol_type = other DNA
tcagcatccatacctcaatcgggggggaaggttccaatggaaccctct

SEQ ID NO: 2316 - DNA, 69 bp, Beet cryptic virus 3
  source 1..69: mol_type = other DNA
ttttgtttgtaatgaactcttttaataaacataataaagttctacggaaagggctatttaacccttacc

SEQ ID NO: 2317 - DNA, 57 bp, Brassica campestris chinensis cryptic virus 1
  source 1..57: mol_type = other DNA
taggttgtaatatttaatttacttataagcgtttgaacgagggataaaccccgttcc

SEQ ID NO: 2318 - DNA, 101 bp, Camellia oleifera cryptic virus 1
  source 1..101: mol_type = other DNA
cgcaatttaattgcaataaaatttcgattttatcaaaatttatttaaaattaattgtgtcgcattatttccctacaagtggtgtagaggtctaatgctaca

SEQ ID NO: 2319 - DNA, 38 bp, Cinnamomum chago deltapartitivirus 1
  source 1..38: mol_type = other DNA
tttaacgcttgaatgtaatgacgtagagggttattaac

SEQ ID NO: 2320 - DNA, 22 bp, Cinnamomum chago deltapartitivirus 2
  source 1..22: mol_type = other DNA
ccgcgacaataaataaaggggc

SEQ ID NO: 2321 - DNA, 70 bp, Dactylorhiza hatagirea deltapartitivirus
  source 1..70: mol_type = other DNA
tttagaagttttattactttcttttaagagcattgtaatttcaaatttagtttgacgtggaagattacac

SEQ ID NO: 2322 - DNA, 135 bp, Fig cryptic virus
  source 1..135: mol_type = other DNA
tgcaattttattaataaaagatactttcttttacgatatttcttagttgttgaattaacaattattatatatagtgagatgtgacgtgtccgaagttattatacaaatcggacaccaccacctcctggattaacc

SEQ ID NO: 2323 - DNA, 119 bp, Ilomantsi deltapartitivirus
  source 1..119: mol_type = other DNA
tcttttgtttatggttacaatggcatgtacagtgtaattttggcgagcaaaatcttcagagaagcaaaactcagaggcataaaaagttagtcaggttaactttttaacctgactaacca

SEQ ID NO: 2324 - DNA, 100 bp, Inari deltapartitivirus
  source 1..100: mol_type = other DNA
ttcagtttgtttatcgttttaagtacacgggcttaaaattttaggacgagttgaaatacaacttcctgtaaagaactcagacgccaaacacacccaacac

SEQ ID NO: 2325 - DNA, 94 bp, Japanese plum-yew deltapartitivirus
  source 1..94: mol_type = other DNA
tattttccatttaaataaagagatttatttttaaatggtttgttgcacttaacctcaaattttgagacccctcgagtgcaacacaacccgtcca

SEQ ID NO: 2326 - DNA, 76 bp, Medicago sativa deltapartitivirus 1
  source 1..76: mol_type = other DNA
atcacaaattgtaatttatttaataacgttaataaatcagtgagggaggcatttaacccccttctaaaaaaaaaag

SEQ ID NO: 2327 - DNA, 31 bp, Pepper cryptic virus 1; identical to SEQ ID NO: 693
  source 1..31: mol_type = other DNA

SEQ ID NO: 2328 - DNA, 78 bp, Pepper cryptic virus 2
  source 1..78: mol_type = other DNA
atgattgtaatatcaacctattaacaattcatatatgaaatgatgttgaagtcggagtggctgccaacacaccgctct

SEQ ID NO: 2329 - DNA, 42 bp, Plant associated deltapartitivirus 1
  source 1..42: mol_type = other DNA
tgagcgaccatacctcaatcgaggggaaggccctacaaggac

SEQ ID NO: 2330 - DNA, 49 bp, Plant associated deltapartitivirus 2
  source 1..49: mol_type = other DNA
gttgtaataattttaatttaataaaatttgtttcgtaagaggttaccac

SEQ ID NO: 2331 - DNA, 64 bp, Plant associated deltapartitivirus 3
  source 1..64: mol_type = other DNA
ttttgtattattgtaatcaattatatgaaattttaataaacgtgcatggaaggctttatacccc

SEQ ID NO: 2332 - DNA, 74 bp, Plant associated deltapartitivirus 6
  source 1..74: mol_type = other DNA
gaaagacttataaaagatttataagctgggcgaggattgtacataagaagtcagagtggctgcccaaaaccgct

SEQ ID NO: 2333 - DNA, 113 bp, Port Orford cedar deltapartitivirus
  source 1..113: mol_type = other DNA
tacttaccaaattaataaataaaattatttctttctttggttcgattgcaggccgatttcgatcgggtcaacactgtgtgttttattcctgcaatcaaccacgtcaaaaaaaa

SEQ ID NO: 2334 - DNA, 53 bp, Quinoa-associated deltapartitivirus 1
  source 1..53: mol_type = other DNA
atgaataaaattttattacacttttgttaggaggctatcacaccttcctaaaa

SEQ ID NO: 2335 - DNA, 36 bp, Quinoa-associated deltapartitivirus 2
  source 1..36: mol_type = other DNA
ggatagcaataagttcttagtaggggctacggaaac

SEQ ID NO: 2336 - DNA, 51 bp, Red clover cryptic virus 3
  source 1..51: mol_type = other DNA
ttaataataaatctaataaaatcagttttagggaggcaagaacccccctct

SEQ ID NO: 2337 - DNA, 34 bp, Ribbonwort deltapartitivirus
  source 1..34: mol_type = other DNA
ctttacaaggtcagggagagaagctgtagctcca

SEQ ID NO: 2338 - DNA, 84 bp, Silvergrass cryptic virus 1
  source 1..84: mol_type = other DNA
tccttttattgtaatgaactttatttatataaaaggaccctcttgcataactctacgttcgtaggattatgcggagaccttatc

SEQ ID NO: 2339 - DNA, 136 bp, Spinach deltapartitivirus 1
  source 1..136: mol_type = other DNA
tattattatcttaatgaagaatatatattctatcattttactcttttcgcgtttacattactagtagattagaatcgacagtgaagtgtggtatgtgtcctttatgattttcatagaacaaggacaccaccgccct

SEQ ID NO: 2340 - DNA, 85 bp, Subalpine fir deltapartitivirus
  source 1..85: mol_type = other DNA
tcatcgcgaaagttttataattttcgtgtcgttgcagttaggcttaccgaaatggaagtgttacttactgcaacaacaccaaaag

SEQ ID NO: 2341 - DNA, 11 bp, Taiwan douglas-fir deltapartitivirus
  source 1..11: mol_type = other DNA
accaacagatc

SEQ ID NO: 2342 - DNA, 122 bp, Vaasa deltapartitivirus
  source 1..122: mol_type = other DNA
cttttcacctcgaaacgaaaagcggaacaacatccaacagtctctacagacttccatacagcttaacacctgggtccgaatggagaccacaccgctaaaaccccaccaaacacacccaacac

SEQ ID NO: 2343 - DNA, 84 bp, Yunnan larch deltapartitivirus
  source 1..84: mol_type = other DNA
taaacacgttttcttaataaaagacgtgcctgttgcagtgggacttaccgatatggaaagtgttacttactgcaacgacaccat

SEQ ID NO: 2344 - DNA, 93 bp, Cordyceps chanhua partitivirus 1
  source 1..93: mol_type = other DNA
aagtgtaactttcgctgtgttacagcatttttcgtgtatacgggaatgtgtgaagcgacctgtttatcaggtttatatatataacaacaatcc

SEQ ID NO: 2345 - DNA, 17 bp, Erysiphe necator associated gammapartitivirus 1
  source 1..17: mol_type = other DNA
cctaaatcatgtttatc

SEQ ID NO: 2346 - DNA, 44 bp, Gammapartitivirus sp.
  source 1..44: mol_type = other DNA
gagtgtaaatctctgcagataatgcaaagtctaagcgtgtaaac

SEQ ID NO: 2347 - DNA, 91 bp, Metarhizium brunneum partitivirus 2
  source 1..91: mol_type = other DNA
gagtgaaaatctcacgtgcaaacggagtgtcttcctgtgtaaacaggggattaataacgtaccgtgtaaacggtttgtgaaataaaatcca

SEQ ID NO: 2348 - DNA, 55 bp, Ophiostoma partitivirus 1
  source 1..55: mol_type = other DNA
atcgcacttcgcacttcgtgcgtgacaataccaatctgtttatcagggaaattgt

SEQ ID NO: 2349 - DNA, 1139 bp, Aegean partiti-like virus
  source 1..1139: mol_type = other DNA
atagcgtgacatattaaatataatcaaaatacactatgactttaaagattatagacgctttcaaaatgaaacccgcaccaatgtttgaaggtgcaataacaagtattgatccgaaacatattttagccacgattgggcacacgttgtgctttgaactatataaagaaaaagttgcaaacgagttccactctagagcgttgtcttttaaggctagttcgctgaacaacatttgtagaatggtaggagcacagtcaagcagcactgttgaccaatttgatgaaatcatacaagacatcgcacgcttatctatggcaatggtagtgcacctaactaaatatagaacggcgaacgaagcgatctacaatttgagactgaaggaggtacatatacccgctttcttaattccagttatcagacttatgaatacaggcttcttcacgatggtgatacctaacactgaatctacgattaacgtggaaaaagtagaagacacgagagtagttggaggaaatattggtaaggacaagataacgaaggaagaaggaatagtagcgtgtatgtcaaggctttccataatttgtaatgaattggatatacttgacattcgacgagtagacatgggaaatctttacgaggaaagtgagcagttcctagatttgaacgtagaggaagccgttattagtgaagggaaattgtcaaaaatcaggttccagtataaagacacagagaataaagaagaaattgatactatatctttatgcttacagtccgtaaaatgggataaagagtacgacgaattatttagattcagagtatgtacgctatcgagacaagtgatagttgacaacatctctcgtaaagatatagaattaagtagtcaaggtggtgctgctggtagagtgcaaatcgaggacaaataccagaaaagtgagaattcgttaaagaaccctaaggtaaaaagagagctgcaatcagctaaggttataaatagaaatgagaagggagtaacgaatacgttttatgatgaaggaggtggtagaaactaattaatacaagttaaaaagctaaaaaatttttaaaggctatggttaagagattatatttaatatatatcttgggctccatagcccaaaaaaaaa

SEQ ID NO: 2350 - DNA, 110 bp, Alloteropsis cryptic virus 1
  source 1..110: mol_type = other DNA
aatgttgaagtttctttcttgtaccccgacacatttatgtaaaattaaagaagttttattgataatgggtgggtaaacggttttatgcgtatacccactccctcccaaaa

SEQ ID NO: 2351 - DNA, 60 bp, Alloteropsis cryptic virus 2
  source 1..60: mol_type = other DNA
ttgtattatattttcatataataagacgctcgggagggctcttaacccccaccaaaaaaa

SEQ ID NO: 2352 - DNA, 83 bp, Alternaria alternata partitivirus 1
  source 1..83: mol_type = other DNA
cagtgttacttcttacatattgtaaggctaggattgtctcattaggcaatcgtagtgaagatctaagcacacctgctgcaacc

SEQ ID NO: 2353 - DNA, 187 bp, Alternaria dianthicola partitivirus 1
  source 1..187: mol_type = other DNA
agatagtgcatggcggaagggcacccagaggttggacatcgaagaggtccctcttttggagatcaatcttttacgttttgtaagagtgttactctcgtccgagtcaagttactcacccctcgtggtttatccactggtcgtgattaccatgtgcgtgttaaacgcactttaatggttataacaatca

SEQ ID NO: 2354 - DNA, 122 bp, Alternaria tenuissima partitivirus 1
  source 1..122: mol_type = other DNA
gagtgttactctcgtccgagtcaagttactcacccctcgtggtttatccactggtcgtgattacctgtcgcgtgcataacgcgacgttaatggttataacaatcaggatcccgggaattcgg

SEQ ID NO: 2355 - DNA, 149 bp, Amalga-like chassivirus
  source 1..149: mol_type = other DNA
atcccaccgtttcttatttaactctcaacttttactccactcaggttcaatctagaacccaaattggtttgctatcgtagcgatttgcgttgctactgtgcgagccacctcgtaatacggtgagcgcacttctgtgcttacaagatcgg

SEQ ID NO: 2356 - DNA, 108 bp, Amalga-like chaucrivirus
  source 1..108: mol_type = other DNA
atgaaggtttagaatggtcttaatatttttatgcttcagcgacgctggggtgcatacgacacatgcatgattacaccaatcaacaaacatatgcatggtgctacggac

SEQ ID NO: 2357 - DNA, 109 bp, Amalga-like dominovirus
  source 1..109: mol_type = other DNA
tggtctataatattcttctcgtattggtcctaagccttaggatcgcagtaaggttgtctattaggtgtgataactcgtgagatacccacatctatagactggcgcattg

SEQ ID NO: 2358 - DNA, 102 bp, Amalga-like lacheneauvirus
  source 1..102: mol_type = other DNA
ttctctcccgtagtcattgactgatccctatttcggatggttattagtagttggttttattattcttatttatactcccattgggttatacatatatacgcc

SEQ ID NO: 2359 - DNA, 74 bp, Amaranthus cryptic virus 1
  source 1..74: mol_type = other DNA
atgtaattttatatttatttatatttgcattatgtaataaacttaataatgttttcgtgaagaggctacaaaac

SEQ ID NO: 2360 - DNA, 22 bp, Amaranthus cryptic virus 2
  source 1..22: mol_type = other DNA
gggccgacacagggttcgggca

SEQ ID NO: 2361 - DNA, 96 bp, Amaranthus cryptic virus 3
  source 1..96: mol_type = other DNA
ttttaccgtgatgctagatgcctaatcaccatttgtctcacccatttcttatttatgaaaatttttatgtaaatgtgtattaaactatctaaaatc

SEQ ID NO: 2362 - DNA, 54 bp, Ambrosia cryptic virus 1
  source 1..54: mol_type = other DNA
agccgatcgctttcttgtttctttttttaatgtaatgttaaattaatttaaagc

SEQ ID NO: 2363 - DNA, 60 bp, Ambrosia cryptic virus 2
  source 1..60: mol_type = other DNA
ttttaatatgtaattttgttttaatcaattttcttgagcaggaggttacaaccccctact

SEQ ID NO: 2364 - DNA, 134 bp, Aplosporella javeedii partitivirus 1
  source 1..134: mol_type = other DNA
ttgtagtttgagctggcaattttttgaactttttcgttctgtaacaacagaaattgaaaacacattcttttagatttatatatcaattataaacaaatcctaaacaaaaaatcaatccctctctaaaacaaacc

SEQ ID NO: 2365 - DNA, 24 bp, Apple partiti-like virus 1
  source 1..24: mol_type = other DNA
ggcgcggtgcaggttaaaacctgc

SEQ ID NO: 2366 - DNA, 18 bp, Apple partiti-like virus 3
  source 1..18: mol_type = other DNA
ctgcggccgcgacaccct

SEQ ID NO: 2367 - DNA, 97 bp, Arabidopsis halleri partitivirus 1
  source 1..97: mol_type = other DNA
gataggacgttattaatatttatttttacgtttctgccctttgtaactaaaaatttaaaataataataataatatatagataaataaaagaataaat

SEQ ID NO: 2368 - DNA, 76 bp, Aspergillus creber partitivirus 1
  source 1..76: mol_type = other DNA
cgaccacccattactttggggcttactacatctcattagtgtagtttgtgattgttacatttcacctccaaaacca

SEQ ID NO: 2369 - DNA, 96 bp, Aspergillus flavus partitivirus 1
  source 1..96: mol_type = other DNA
gcccacgaggaaactgaaagccagcagctgcatttactcgcagcgacctaggcggaagaggcttctacgcccctttttctctccactccctcttcc

SEQ ID NO: 2370 - DNA, 58 bp, Aspergillus flavus partitivirus 2
  source 1..58: mol_type = other DNA
cttcgtttcagccgcgctgaaatggaaatacaacttttcataaaatttccaaaaaaag

SEQ ID NO: 2371 - DNA, 85 bp, Aspergillus fumigatus partitivirus 1
  source 1..85: mol_type = other DNA
gagtgtcttcttctgcagaacgcaggtcttcctgtttatcaggaggatgtaacgtgccgtttatcggcgctttccgttatatcca

SEQ ID NO: 2372 - DNA, 66 bp, Aspergillus fumigatus partitivirus 2
  source 1..66: mol_type = other DNA
ccgacaacgacatgttaggaactgaagtctcattagcttcgatagtgttttcactcctaacaccaa

SEQ ID NO: 2373 - DNA, 66 bp, Aspergillus lentulus partitivirus 1
  source 1..66: mol_type = other DNA
ccagcaagaccagttaggaatcgagcttctcattagagctcatagtgttcaccactcctaacacca

SEQ ID NO: 2374 - DNA, 81 bp, Aspergillus nidulans partitivirus 1
  source 1..81: mol_type = other DNA
tccagactcatatagtgtttccatgttaacactctaatcttcacaggacaaatcactatatttttatagtgagtcgtatta

SEQ ID NO: 2375 - DNA, 80 bp, Aspergillus niger partitivirus 1
  source 1..80: mol_type = other DNA
gcccagaggatcagaaaggactgactggacatacctcgtccacgcctaatccgatcgagagcccctcattcaatctcatc

SEQ ID NO: 2376 - DNA, 87 bp, Aspergillus protuberus partitivirus 1
  source 1..87: mol_type = other DNA
gagtgcttcctctgcagtgaatgcagaaactttggtgtaaaccaggagttgtgacgcgcgtgtaaacgcgcagtgaattcaaaatcc

SEQ ID NO: 2377 - DNA, 64 bp, Atrato Partiti-like virus 2
  source 1..64: mol_type = other DNA
cagtgatggcttatagacgagcgtggatagacacctcgtttggcgctggaattgtgagggttct

SEQ ID NO: 2378 - DNA, 35 bp, Atrato Partiti-like virus 3
  source 1..35: mol_type = other DNA
agagtagcctatagctcgactcgcaaacatgtccc

SEQ ID NO: 2379 - DNA, 92 bp, Atrato Partiti-like virus 5
  source 1..92: mol_type = other DNA
ttgagcgtggctaacccgtatatcctctgaagaagcataactagaagtccttagttatgcctgatcaaaaggcataactagaagtccttagt

SEQ ID NO: 2380 - DNA, 109 bp, Atrato Partiti-like virus 6
  source 1..109: mol_type = other DNA
cgtgtcccgctttaccaaagtacgcgtccgcgctaggcgccaacttgtatggttgtaaactatgctaacactttgctccaaaggtggtatccgtgtactacacacatgg

SEQ ID NO: 2381 - DNA, 100 bp, Bactrocera dorsalis partiti-like virus 1
  source 1..100: mol_type = other DNA
actaagacaaaactaaattaagcataaacttaaaactagattaagcataaacttaaagtagaaatgaaatagaataagaaacaaaacaaaacaatagtaa

SEQ ID NO: 2382 - DNA, 45 bp, Bactrocera dorsalis partiti-like virus 2
  source 1..45: mol_type = other DNA
gagtaagttagcagctaaagtcccagttgctaggtaattgggcgc

SEQ ID NO: 2383 - DNA, 25 bp, Bactrocera dorsalis partiti-like virus 2 isolate Bf
  source 1..25: mol_type = other DNA
gagtaagttggcaactaaagtccca

SEQ ID NO: 2384 - DNA, 57 bp, Bactrocera dorsalis partiti-like virus 2 isolate Bl
  source 1..57: mol_type = other DNA
gagtaagttagcagctaaagtcccagttgctaggtaattgggcgctttaaaaacaaa

SEQ ID NO: 2385 - DNA, 35 bp, Bania partiti-like virus
  source 1..35: mol_type = other DNA
caaaattctcgcggtaagcgcaagcgaacccgaca

SEQ ID NO: 2386 - DNA, 35 bp, Baringo Partiti-like virus
  source 1..35: mol_type = other DNA
ctcattactgccggtagcaaagctttaaagttggg

SEQ ID NO: 2387 - DNA, 83 bp, Beauveria bassiana partitivirus 1
  source 1..83: mol_type = other DNA
gtaccgtgtcctctgcagtaactgcatccgtttatcggtgatgtgttacgaactccgtttatcggagttttcgttaaagatca

SEQ ID NO: 2388 - DNA, 26 bp, Beauveria bassiana partitivirus 2
  source 1..26: mol_type = other DNA
aggagtgaaatcttgaacataaagtg

SEQ ID NO: 2389 - DNA, 53 bp, Beauveria bassiana partitivirus 3
  source 1..53: mol_type = other DNA
tcgcctttagcgttgaccaaaataacagtgataccccacggtcgtaatagggg

SEQ ID NO: 2390 - DNA, 25 bp, Benes partiti-like virus
  source 1..25: mol_type = other DNA
cgaaggtttgatgggctaccccccc

SEQ ID NO: 2391 - DNA, 62 bp, Bipolaris maydis partitivirus 1
  source 1..62: mol_type = other DNA
acagttcagtttgatttactgaaaattataaaatttaaaaaaaaatcaaaaaaaataaaagt

SEQ ID NO: 2392 - DNA, 131 bp, Bipolaris maydis partitivirus 2
  source 1..131: mol_type = other DNA
taacgctaacacactgcttctagtttacatgaattctagatttgttttacggttgagttacacactcgtttcccctccggattcacccatccgagagagaaaaacccccaaaaacatataaaaacttaccc

SEQ ID NO: 2393 - DNA, 70 bp, Botryosphaeria dothidea partitivirus 1
  source 1..70: mol_type = other DNA
acacaccacattaggtgactcggttctcattagaccggacagtgatgcaataacctcacccctaacacca

SEQ ID NO: 2394 - DNA, 69 bp, Botryosphaeria dothidea partitivirus 1-like
  source 1..69: mol_type = other DNA
gcacaccacattaggtgactcggttctcattagaccggacagtgatgcaataacctcacccctaacacc

SEQ ID NO: 2395 - DNA, 49 bp, Botryosphaeria dothidea partitivirus 3
  source 1..49: mol_type = other DNA
gttttaccgtgttacgggttttccgcctccttcattacatagacctttc

SEQ ID NO: 2396 - DNA, 75 bp, Botryosphaeria dothidea partitivirus 3-1; identical to SEQ ID NO: 1925
  source 1..75: mol_type = other DNA

SEQ ID NO: 2397 - DNA, 139 bp, Botryosphaeria dothidea partitivirus 4
  source 1..139: mol_type = other DNA
gttggtattaagaaaagacggaagggagacactgtagttgccttccaagatctagtgcgacctgattaaccaccctcttacatcggtctttgaaatttttttttctcatgtacagcgatagaaacctcaccccgtcttg

SEQ ID NO: 2398 - DNA, 109 bp, Botryotinia fuckeliana partitivirus 1
  source 1..109: mol_type = other DNA
tgtctcacacaacacctaacgtaagagtgtacttctgcagcaattgcaaattcaactgtttatcagtggatgtgacgttcagtttaactgaatgtgaaaattaaaatcc

SEQ ID NO: 2399 - DNA, 83 bp, Botrytis cinerea partitivirus 2
  source 1..83: mol_type = other DNA
ccgactgtgcagtctttgagtttcgttataaaatttcgaaataaaaacaaaatttaaaacaacaaaacccaaaaaaaaaaact

SEQ ID NO: 2400 - DNA, 99 bp, Botrytis cinerea partitivirus 3
  source 1..99: mol_type = other DNA
taatactagcttttcttcgtcttaagcgacaaacaaacacaatcatggtttatccatctagagtgtcctactcactggtctatccagttagaagttaat

SEQ ID NO: 2401 - DNA, 145 bp, Bremia lactucae associated partitivirus 1
  source 1..145: mol_type = other DNA
catggtgtaatttctaccacgtgcctcttttttaaaagacgcatctgtagatattgctaccttgatgattttattctcaattatgagaattagctcttcccaagacttttaaaaaacacttcgaggaccaaagttttagtttaca

SEQ ID NO: 2402 - DNA, 47 bp, Caledonia partiti-like virus
  source 1..47: mol_type = other DNA
tgtattccgctgtgtcagcgatgaggcgaaagcccgcacgcccctgg

SEQ ID NO: 2403 - DNA, 93 bp, Caloscypha fulgens partitivirus 1
  source 1..93: mol_type = other DNA
tttgatctcattcatttgatcattattagacgtaataaataaaaaaaaaagaaaaaaaaaaaaacaaaaccccaacatggtggcgaccggtag

SEQ ID NO: 2404 - DNA, 17 bp, Caloscypha fulgens partitivirus 4
  source 1..17: mol_type = other DNA
attttaccgatctggta

SEQ ID NO: 2405 - DNA, 80 bp, Caloscypha fulgens partitivirus 5
  source 1..80: mol_type = other DNA
taggccgtatgcctcaaggcagtgacgttttacaccggaattatctaaccaaaaactgaaaaacaaacaaaaaaataaaa

SEQ ID NO: 2406 - DNA, 113 bp, Camellia cryptic virus 1
  source 1..113: mol_type = other DNA
cgcaatttatttgcaataaaactacgattttacaatcatttattttaaatttaaattgtgtcgcattatttccttacacagtggtgtagaggtctaatgcgacacaacatgtc

SEQ ID NO: 2407 - DNA, 542 bp, Cane toad associated partiti-like virus
  source 1..542: mol_type = other DNA
agacagcagagctcattcggatgatcaatttttagatccattccgaagagtttctttgcacgcattacaaggtcgtcatcaacgcatgtacaacaacgagtgtgacaatcgtcgccgtatgccactgtcagcgaaggaaatggaccttgtataattagcctcgatgggcagtcgcagtcatgaagttcgtacatgacaatgtaggaaatgatggtatcaataatgttagttaacatgcctcccgagggtacgccatgcttcaaatacagtggctttgtgatctggggagtcacgactttcttattggtgtaaacgtgctctacccactttaataatgtatggataccagttggtataccataatgctcgtattgtgttagatccaagcaacatcttagtacagtgaaggctgctcgaatgacccaagatggtacactagaatcaaacttcgaaaaatcgaaggatttcgcgtatttaccacagaaatactcgtgatgagtttcaggtttaggaacccaattctctggtaaccgcgttaagaa

SEQ ID NO: 2408 - DNA, 59 bp, Cannabis sativa partitivirus
  source 1..59: mol_type = other DNA
aagccgatcgctttgtttgtttcttttaaatgcaaaaaaaaaaaaaaaacaaaaaaaaa

SEQ ID NO: 2409 - DNA, 45 bp, Carnation cryptic virus 3
  source 1..45: mol_type = other DNA
actgcatccatacccacaccgggggaaggttctaacgaaccctcc

SEQ ID NO: 2410 - DNA, 86 bp, Ceratobasidium partitivirus
  source 1..86: mol_type = other DNA
aaatctttatccatcttataaattattataaaatcaaaataaaccccaaaacgcgcctgctaactgtacgcgcgagatcggaagag

SEQ ID NO: 2411 - DNA, 14 bp, Ceratobasidium partitivirus-like
  source 1..14: mol_type = other DNA
ttcatgaccttagc

SEQ ID NO: 2412 - DNA, 16 bp, Chiles partiti-like virus
  source 1..16: mol_type = other DNA
tgtcagaacattgacc

SEQ ID NO: 2413 - DNA, 62 bp, Citrullus lanatus cryptic virus
  source 1..62: mol_type = other DNA
ttagttttaatgtataaactctttaataaagcgtcaagggagttatttaacccttaccttct

SEQ ID NO: 2414 - DNA, 48 bp, Citrullus lanatus partitivirus
  source 1..48: mol_type = other DNA
ttagttttaatgtataaactctttaataaagcgtcaagggagttattg

SEQ ID NO: 2415 - DNA, 89 bp, Cladosporium cladosporioides partitivirus 1
  source 1..89: mol_type = other DNA
gagtgactctaacagtagagtgaatcatattttcagtatatctgaggtgtgtgataaatcagtttatctgattttaaactataaaatcc

SEQ ID NO: 2416 - DNA, 80 bp, Cladosporium cladosporioides partitivirus 2
  source 1..80: mol_type = other DNA
agggaggaatccacagaaacctatgattaggtagaaacaacaactacactatgaggggtactctgtacaacacttgtacc

SEQ ID NO: 2417 - DNA, 89 bp, Cladosporium ramotenellum partitivirus 1
  source 1..89: mol_type = other DNA
gagtgactctaacagtagagtgaatcatattttcagtggaaactgaggtgtgtgacaaacccgtttatcgggttttaactataaaatcc

SEQ ID NO: 2418 - DNA, 70 bp, Clohesyomyces aquaticus partitivirus 1
  source 1..70: mol_type = other DNA
ccgactgtgcagtcttgagtattgttatattaacaatataaaaaaaaatattaaaacaaacaacaaaact

SEQ ID NO: 2419 - DNA, 78 bp, Colletotrichum associated partitivirus 1
  source 1..78: mol_type = other DNA
cgagagtccaacgaaacctataatgttatagttcataacgaactgtcactaggggttcctcgttcaacaccaagaacc

SEQ ID NO: 2420 - DNA, 64 bp, Colletotrichum associated partitivirus 2
  source 1..64: mol_type = other DNA
gtcccacacaccataagcagtttttttctacctaaattttctacaaaaaacgaaaaaaaataaa

SEQ ID NO: 2421 - DNA, 29 bp, Colletotrichum eremochloae partitivirus 1
  source 1..29: mol_type = other DNA
tgtaccgtcaaaacgattagtgatcaccc

SEQ ID NO: 2422 - DNA, 78 bp, Colletotrichum gloeosporioides partitivirus 1
  source 1..78: mol_type = other DNA
ccagagtccacagaaacctgttatagctagatacctacatttctagtccttaggggtactctgttcaacacgagcacc

SEQ ID NO: 2423 - DNA, 27 bp, Colletotrichum liriopes partitivirus 1
  source 1..27: mol_type = other DNA
caccggactccaaaactttgaaacccc

SEQ ID NO: 2424 - DNA, 97 bp, Colletotrichum truncatum partitivirus 1
  source 1..97: mol_type = other DNA
gagtgttagcttctgctgaagttagccgtttatcggcgtctactgtttatcagggattgcaacgtgtgtgtaaacatgcgtgttaacaaataatcca

SEQ ID NO: 2425 - DNA, 83 bp, Costanza partiti-like virus
  source 1..83: mol_type = other DNA
ccttggtgatcccctagcttaatggatagagcacaccattcgaaggtgtagatcccggttcgagtccgggggggaagcccgta

SEQ ID NO: 2426 - DNA, 65 bp, Cucumis melo cryptic virus
  source 1..65: mol_type = other DNA
attcttgtaattaagactttatgaatgtaagtttacttcttagtgggaggctattaaccctcacc

SEQ ID NO: 2427 - DNA, 103 bp, Culex pseudovishnui partitivirus
  source 1..103: mol_type = other DNA
gatcttcgctttcgcacaagtccgttctcaccacccgaaaccagtagacctccgaccctacaatcatcttctttagaccatctaattaagggtcctagtcagg

SEQ ID NO: 2428 - DNA, 73 bp, Culex tritaeniorhynchus partitivirus
  source 1..73: mol_type = other DNA
gttgagataactccctcccagtgttgtgtaaacgaccctctcgctgaagtcctagcgagaggcctgtagaaag

SEQ ID NO: 2429 - DNA, 37 bp, Curvularia lunata partitivirus 1
  source 1..37: mol_type = other DNA
acgattcagttttacttctgatttctacaaaataaat

SEQ ID NO: 2430 - DNA, 82 bp, Curvularia lunata partitivirus 2
  source 1..82: mol_type = other DNA
tgacgtccgctccttactttcagttaattgtactgtttgcgtttactgttctttttacttttcctttgtaaataaaactaca

SEQ ID NO: 2431 - DNA, 22 bp, Dactylorhiza cryptic virus 1
  source 1..22: mol_type = other DNA
tgtaggcgttataagcttaagt

SEQ ID NO: 2432 - DNA, 53 bp, Dactylorhiza cryptic virus 2
  source 1..53: mol_type = other DNA
tttatgttaaagttttatgtaatttttcggaggagactatcaaccccctcttt

SEQ ID NO: 2433 - DNA, 92 bp, Davola partiti-like virus
  source 1..92: mol_type = other DNA
tgagttagtagactagggggattgaggaactctagaggaaagcttgtcattgttataatacctgttcattcagggggtaatgtcatgccgtc

SEQ ID NO: 2434 - DNA, 90 bp, Delitschia confertaspora partitivirus 1
  source 1..90: mol_type = other DNA
cacgtattccccccctcccactgtagggatctcgcctctcattaaggtgaaacagtgagttgatggactattccatctccccacctctac

SEQ ID NO: 2435 - DNA, 130 bp, Dichroa partitivirus 1
  source 1..130: mol_type = other DNA
agagttttgtttgcagtgttagctaagctcggtttttggtctttttttgtcttaacggacaaatttttgtctcttcttacgaagagaagaaaaatataatacaaaaaaaaacataaaaactcaaaagtcc

SEQ ID NO: 2436 - DNA, 38 bp, Dichroa partitivirus 2
  source 1..38: mol_type = other DNA
ttttattatatagacgcaaaaggaggctaattaacccc

SEQ ID NO: 2437 - DNA, 70 bp, Dill cryptic virus 1
  source 1..70: mol_type = other DNA
agcccgatcgctttgtttgttattttttaaaaaaaaaaaaaaaaaaaaaaaaaaacaaaaactaactgcc

SEQ ID NO: 2438 - DNA, 54 bp, Diplodia seriata partitivirus 1
  source 1..54: mol_type = other DNA
taagtactgcaccacggtgatgacaaggacctcaaacctttccccttcggggaa

SEQ ID NO: 2439 - DNA, 62 bp, Diuris pendunculata cryptic virus
  source 1..62: mol_type = other DNA
gttcgtgttatttctgaaaattaataaaaacaataattaatttacaaaaataacacgaactc

SEQ ID NO: 2440 - DNA, 44 bp, Dragana partiti-like virus
  source 1..44: mol_type = other DNA
agcctccgtgcccatgcccccactataaatataggtgaacccct

SEQ ID NO: 2441 - DNA, 40 bp, Drechslerella stenobrocha partitivirus 1
  source 1..40: mol_type = other DNA
tctgtctggcaaactactccgtggcagagaagtgccaaga

SEQ ID NO: 2442 - DNA, 50 bp, Drosophila biauraria male killing partitivirus 1
  source 1..50: mol_type = other DNA
ccctttggcatatatacccgggactcaaaatatagggtaggccaagtccc

SEQ ID NO: 2443 - DNA, 100 bp, Echinochloa crusgalli partitivirus
  source 1..100: mol_type = other DNA
gtttaagacgttattttttttcgtcttttctcttaaaaaaaaaaaaaaaaaaaaaaaaaaaaaaaaaaaaaaaaaaaaaaaaaaaaaaaaaaaaaaaaaa

SEQ ID NO: 2444 - DNA, 173 bp, Enontekio partiti-like virus
  source 1..173: mol_type = other DNA
atcaccatctttaacaactttctcaattgtccaagatgttagcggttttcgcaatgcgaacacaaactcgcttcgaacatcttcaattgcattgaaaagtctgttatcttcgaactttttcgcgtattcgactctactgtagcccagtgttgactggcggagggtatctttgg

SEQ ID NO: 2445 - DNA, 88 bp, Entoleuca partitivirus 1
  source 1..88: mol_type = other DNA
agtgttgaatttttacgtttaactcttatctcttaagtaaaaaaaaaataaaaaaagaaaaacccaaaaaaaaaataaataaaaaagt

SEQ ID NO: 2446 - DNA, 68 bp, Entoleuca partitivirus 2
  source 1..68: mol_type = other DNA
tgataatttttttcactattttacacataaaaaaaaaaaaacacaaaaaaaatcaaaaaaaatcccct

SEQ ID NO: 2447 - DNA, 393 bp, Entomophthora partitivirus D
  source 1..393: mol_type = other DNA
tggcgctcacatcccatcctcgtcgccacttgacataacttgaattagttatataaatgaaacaatctattttaagttcacaaaaagtatattaatgattaattatattttgataattatgcgttttattgtatgaacacgaacaaaagataagtcaaagggccagtcaaagataagtgatgccaatcgttaacgttgaaaacccctccaagccgacagtaattcaccacactacactatgtttagggtttcaaatgtattcttttgctcagtttgaattaaaacttaatttttatttttacaaaatatgcaattatattaaaaatatgcaaaaataaaaaaaataattataacaaaaaaagaacaaaaaaaaaatatcttaaaaaacttaaa

SEQ ID NO: 2448 - DNA, 22 bp, Erysiphe necator associated partiti-like virus 1
  source 1..22: mol_type = other DNA
ccccactccgcgccaaaacgat

SEQ ID NO: 2449 - DNA, 22 bp, Erysiphe necator associated partitivirus 11
  source 1..22: mol_type = other DNA
ccgatgtcgcataacgattcat

SEQ ID NO: 2450 - DNA, 60 bp, Erysiphe necator associated partitivirus 12
  source 1..60: mol_type = other DNA
cgatttgaccagagtcaatttttctttttgagtattttacaatgtactttttcaagaaac

SEQ ID NO: 2451 - DNA, 61 bp, Erysiphe necator associated partitivirus 2
  source 1..61: mol_type = other DNA
gagtgaactctgcagagagtgaatcatattattcagtttatctgaaggtgtgtgatcacag

SEQ ID NO: 2452 - DNA, 60 bp, Erysiphe necator associated partitivirus 3
  source 1..60: mol_type = other DNA
gagtgactctaacagtagagtgaatcatattttcagtgaaaactgaggtgtgtgacaaac

SEQ ID NO: 2453 - DNA, 63 bp, Erysiphe necator associated partitivirus 4
  source 1..63: mol_type = other DNA
ggaaagtttcggtgaccccgattctttttcttttcaaatattcttctaataacaatattacaa

SEQ ID NO: 2454 - DNA, 94 bp, Erysiphe necator associated partitivirus 7
  source 1..94: mol_type = other DNA
tagcaggaatccactgaaacctatgaatagtacattacaatatgtatctatgaggggtaatcaagattcaacatgatcaccctttcaacataac

SEQ ID NO: 2455 - DNA, 44 bp, Erysiphe necator associated partitivirus 9
  source 1..44: mol_type = other DNA
gtctttcctaccaacagcagttttttttctacctaaaactctac

SEQ ID NO: 2456 - DNA, 62 bp, Erysiphe necator partitivirus 1
  source 1..62: mol_type = other DNA
ctgagaatgattctcttggttaatttaaaagattaatctttttgttataatacaaaaataaa

SEQ ID NO: 2457 - DNA, 119 bp, Erysiphe necator partitivirus 2
  source 1..119: mol_type = other DNA
cggatcctgtgatccattgtttatatcttatcaatataaataactaataatttaaaattataaaaaaaatttataaaacttaaacaataaacaatataaatatcatttcaacaaacaag

SEQ ID NO: 2458 - DNA, 143 bp, Erysiphe necator partitivirus 3
  source 1..143: mol_type = other DNA
gaggagcagttctcccctaatttcttcgtttattcgttttgctatctcgcattttttcttcttttatacaaaagtaaaaaaaaattttaaaagatctcacgaaagtgagcataaaacaactaacaaaaattagtatatgtccg

SEQ ID NO: 2459 - DNA, 71 bp, Flumine partitivirus 2
  source 1..71: mol_type = other DNA
gtttaagacgttattttaaaaaaatttacgtcttaccttccaaaagaagacgttaaaattaaaaaaaataa

SEQ ID NO: 2460 - DNA, 96 bp, Flumine partitivirus 3
  source 1..96: mol_type = other DNA
aaaaattttccgtgatcttttttgtgtttaataacatgaaatttcatcccgtttttttttaataaaaacccaaaaaaaaccaaaaaaaatcaaaca

SEQ ID NO: 2461 - DNA, 112 bp, Fragaria chiloensis cryptic virus
  source 1..112: mol_type = other DNA
tgtaatgatgtttatcaatacactgtttgttgtcaaccaaccgaatattttatgtatttaaatttacatagaatgtgggttaggagcctgatcactcctaacccctctgatc

SEQ ID NO: 2462 - DNA, 73 bp, Freshwater macrophyte associated partiti-like virus 1
  source 1..73: mol_type = other DNA
cgtcaatcacagcgacgcatttggcataaggggctctttaaacatactgtgatgccgtgcaaaccagcattct

SEQ ID NO: 2463 - DNA, 100 bp, Freshwater macrophyte associated partiti-like virus 2
  source 1..100: mol_type = other DNA
atttgatacaggaatatagaatttgttttacgtaaaagtactttttcttctatactatctcttttatctctcttccccctcccatactaaataacaacgc

SEQ ID NO: 2464 - DNA, 91 bp, Freshwater macrophyte associated partiti-like virus 3
  source 1..91: mol_type = other DNA
cttattatttaatttacacattattttacacatcatcttttatagtgaacttttcactatttcgtgttatagcctaatctagttcacgcta

SEQ ID NO: 2465 - DNA, 96 bp, Fusarium cerealis partitivirus 1
  source 1..96: mol_type = other DNA
ttgttaaccgaaaggcgacgacccctcctaacagaggtctgacctgccggacgtttccgaaactgtagagtttcaagacaaatttcaacacaaaca

SEQ ID NO: 2466 - DNA, 64 bp, Fusarium equiseti partitivirus 1
  source 1..64: mol_type = other DNA
ttgtttagggaaccgacgtctcattagcgtcaacccgtggtgcaaatcactccacccctaaaac

SEQ ID NO: 2467 - DNA, 120 bp, Fusarium mangiferae partitivirus 1
  source 1..120: mol_type = other DNA
gcctaattttgcctggttttgatggagctaacaccttcattttactccatgcttttctttgtataaaacgaaaatataaaactcaaaaaaacaaataaaaacaaaaccttaaaaaaagct

SEQ ID NO: 2468 - DNA, 91 bp, Fusarium mangiferae partitivirus 2
  source 1..91: mol_type = other DNA
gtgtaggagtgacaagaccagtggaaactggcatttcacgtgtataacgggaatttgaaacagccgtttatcggccgtgaaacaaaatcca

SEQ ID NO: 2469 - DNA, 50 bp, Fusarium poae partitivirus 1
  source 1..50: mol_type = other DNA
tttatagttttactagtaatagtttatctattttctgattttttttaatt

SEQ ID NO: 2470 - DNA, 75 bp, Fusarium poae partitivirus 2
  source 1..75: mol_type = other DNA
tttccgtccttaattaccttttcctaaaagaaaaccaaattaaaatttaaaaaaccaaaaaaaatcgacccccta

SEQ ID NO: 2471 - DNA, 83 bp, Fusarium poae partitivirus 3
  source 1..83: mol_type = other DNA
ccgactgtgcagtctttgagtttcgttacaaaatttcgaaataaaaacaaaatttaaaacaacaaaacccaaaaaaaaaaact

SEQ ID NO: 2472 - DNA, 53 bp, Fusarium solani partitivirus 2
  source 1..53: mol_type = other DNA
gtctttcctaccattcagcagttttttttctacctaaaactctacaaaaacga

SEQ ID NO: 2473 - DNA, 56 bp, Gaeumannomyces tritici partitivirus 1
  source 1..56: mol_type = other DNA
atccggttcgtccaaccctgagtttctaagactcttgtaaaaatctctacaaaaac

SEQ ID NO: 2474 - DNA, 59 bp, Gaeumannomyces tritici partitivirus 2
  source 1..59: mol_type = other DNA
cttctcgatgaagatttgctttacattttttaaattaaaaaaaaaaaaaaaaaaaaaaa

SEQ ID NO: 2475 - DNA, 125 bp, Gaeumannomyces tritici partitivirus 3
  source 1..125: mol_type = other DNA
tcaccgctcctttctcttgttacttgtacaagttttggctcgcgtatttctcaaaaattttaaattcaaaaaaataacaaaatacaaaaccaaaaaaaaacaaccccggatcccgggaattcgga

SEQ ID NO: 2476 - DNA, 41 bp, Grapevine associated partitivirus-1
  source 1..41: mol_type = other DNA
tttacagttttactataattcttctgtcactttttaattac

SEQ ID NO: 2477 - DNA, 48 bp, Grapevine cryptic virus
  source 1..48: mol_type = other DNA
gtttgtttgatttcacgttttataatttcaaaattaaaaattttaaaa

SEQ ID NO: 2478 - DNA, 105 bp, Grapevine partitivirus
  source 1..105: mol_type = other DNA
ggctacttttgccgttaggtaaaactgtcatttaaactgatattttatctctcttatttttatacaaaatcccctaaaaaatcaaactaaaaacaaactaaacca

SEQ ID NO: 2479 - DNA, 87 bp, Great lobelia partitivirus
  source 1..87: mol_type = other DNA
cgactgcatccaacccttagacctaatttaatttagctaatatatatttaaaacataaaaaataataaaaaaaattaaaaaagcccc

SEQ ID NO: 2480 - DNA, 79 bp, Grifola frondosa partitivirus 1
  source 1..79: mol_type = other DNA
cctttcaccgtttgaattttttttctttaaaaaaaaaaaaaaaaaaaaaaaaaaaaaaaaaatttcaaaaaaaaatccc

SEQ ID NO: 2481 - DNA, 116 bp, Grosmannia clavigera partitivirus 1
  source 1..116: mol_type = other DNA
tcgcttacgagtttttggatttgtttgcctgctaccttagaaggctagcattttaaattcattttctctaaaagaaaataaaaaaaaaaaaaatttaaaattaccaaaaacccaaa

SEQ ID NO: 2482 - DNA, 37 bp, Guiyang partiti-like virus 1
  source 1..37: mol_type = other DNA
atccggcagcctgacgtagtgtggaaagacaccaaca

SEQ ID NO: 2483 - DNA, 188 bp, Guiyang partitivirus 1
  source 1..188: mol_type = other DNA
accaaaaaaaaatgataattttaaaaatacaaaaatattacaaaattataaaacacaaaaaaactaataaaatttcagaaatgcagagatgcacaaaaaaattccgaaataatacaaaatagtgttaatatactacactaccaaaaacaacaaaaagtatataaaaaaaaaacaaaaaattataagag

SEQ ID NO: 2484 - DNA, 76 bp, Gyromitra esculenta partitivirus 1
  source 1..76: mol_type = other DNA
cgacgctaacgaatttctttgctttaacgctttcaaatctgaaaaaaattaaaaaataaaatccaaaaaaaaattt

SEQ ID NO: 2485 - DNA, 38 bp, Hameenlinna partiti-like virus
  source 1..38: mol_type = other DNA
cagtagttttatgtaatcattaagcccatggaccaaac

SEQ ID NO: 2486 - DNA, 88 bp, Hangzhou partiti-like virus 1
  source 1..88: mol_type = other DNA
taggaggaacccactgaaatctaggacgtcataactcagttactatactgtactttgacagagaggttttcatggttcaacccagaga

SEQ ID NO: 2487 - DNA, 44 bp, Hangzhou partitivirus 1
  source 1..44: mol_type = other DNA
caacgctcacctaggggggcactataaacctcgctacagtcgag

SEQ ID NO: 2488 - DNA, 143 bp, Hattula partiti-like virus
  source 1..143: mol_type = other DNA
aagccacattctagttgaacttgaactggtaaccgctggttacggcagatgacgaaatttccagtacacggaaccaggtagatacgtaagtgcatcacctctacgtgctgagctcttcccgtttcgctcgcacctacccaaac

SEQ ID NO: 2489 - DNA, 84 bp, Hebeloma mesophaeum partitivirus 2
  source 1..84: mol_type = other DNA
tcagtttgagattttttctgaagttatttatcagtttttcaaaaaaaaaaaaaaaaaaaaaaaaaaaaaaaaaaaaaaaaaaaa

SEQ ID NO: 2490 - DNA, 96 bp, Hebeloma mesophaeum partitivirus 3
  source 1..96: mol_type = other DNA
tcagtttcagattttttctgcagtatgtttttcatctttcatatttaaacaaaaaaaaaaaaaaaaaaaaaaaaacaaaaaaaaaaaaaaaaaaaa

SEQ ID NO: 2491 - DNA, 69 bp, Helianthus annuus leaf-associated partitivirus 2
  source 1..69: mol_type = other DNA
ttttattttataatttatataattaaagtttaatatttggctggagggaggctattaaccccacagatc

SEQ ID NO: 2492 - DNA, 11 bp, Helianthus annuus leaf-associated partitivirus 3
  source 1..11: mol_type = other DNA
atcggaagagc

SEQ ID NO: 2493 - DNA, 45 bp, Helianthus cryptic virus 1
  source 1..45: mol_type = other DNA
tttactttgtgtttaaaacgcaaattaatttatgattttatttct

SEQ ID NO: 2494 - DNA, 56 bp, Heterobasidion partitivirus 14
  source 1..56: mol_type = other DNA
cttatttcacaatttctcaaataatccaaactaccaaaaaaaaaaaaaaaaattgc

SEQ ID NO: 2495 - DNA, 67 bp, Heterobasidion partitivirus 4
  source 1..67: mol_type = other DNA
gtttgagatattcttttaatttattaaaaaaaaaaacaaaaaaaaaacaaagaaaaaaaataaaccc

SEQ ID NO: 2496 - DNA, 58 bp, Heterobasidion partitivirus 5
  source 1..58: mol_type = other DNA
gctctttttttcacccgaaaaaactaaacctttcccgaaaaaaaaaaaaaaaaattac

SEQ ID NO: 2497 - DNA, 66 bp, Heterobasidion partitivirus 9
  source 1..66: mol_type = other DNA
gtctgttctttttatttttcaaaaaaaaaaaaaaaaaaaaagaaaaaaaaaaaaaaaaaaaaacac

SEQ ID NO: 2498 - DNA, 25 bp, Heterobasidion parviporum partitivirus Fr 110B
  source 1..25: mol_type = other DNA
gtttgagatattcttttaatttatt

SEQ ID NO: 2499 - DNA, 85 bp, Hymenoscyphus fraxineus partitivirus 1
  source 1..85: mol_type = other DNA
gatttccgtcatcccttaattttcgatcacacgatcaaaataaattaaacaaaaaaaaaaaataaaatcccctataaatcggcct

SEQ ID NO: 2500 - DNA, 53 bp, Hypomyces chrysospermus partitivirus 1
  source 1..53: mol_type = other DNA
ttgactcagagtctttggatttcgtttaactttctttacgaaacaaaataaca

SEQ ID NO: 2501 - DNA, 187 bp, Ilomantsi partiti-like virus 1
  source 1..187: mol_type = other DNA
tatcaggagatcactgataataaggaaatggccaaacacacccaacacaccatgacaagcaacctgctgtgggtagtcggctcattcgtcttcatgctcggagcaaagaagatttcgtgggccctcgcgggagcaagcgcagcagcagcttacggatatctccgtgggcaaaagctgcacttgctta

SEQ ID NO: 2502 - DNA, 39 bp, Ilomantsi partiti-like virus 2
  source 1..39: mol_type = other DNA
tgtattgcccgtattgaataacacgaccaaacacaccca

SEQ ID NO: 2503 - DNA, 64 bp, Impatiens cryptic virus 1
  source 1..64: mol_type = other DNA
aagccgatatgctttagttgttttaataaaaaaaaaaaaaaataaaacaatctaaaaaattgcc

SEQ ID NO: 2504 - DNA, 117 bp, Jilin partiti-like virus 1
  source 1..117: mol_type = other DNA
gctcagctgctttatatgctatttcttcctctatatttagcgcttcatggtatttgtacacattgtattcacatgtatataacaaaaaggacacgaagggatcagagtctgataccc

SEQ ID NO: 2505 - DNA, 150 bp, Kacheliba Partiti-like virus
  source 1..150: mol_type = other DNA
cagcttaaatctgcttcaaggcccaaaactgccttttagtttcttttcgtttatttaactttataaaaattagaaaatgttagataacatctaacacaaaaaaatttataaaaaataaaaaaacacaaaaaaaactaaaaataagatccc

SEQ ID NO: 2506 - DNA, 12 bp, Kagbo partiti-like virus
  source 1..12: mol_type = other DNA
cagtagttttat

SEQ ID NO: 2507 - DNA, 213 bp, Kummerowia striata partitivirus
  source 1..213: mol_type = other DNA
cgatctggtgagctttcgctcaccagatcgttagaacagagatccgaatagtaaaccgtggggtccagaacccacgcccacatcgggagtctcagctccttcgatcatcacacgtctccttaaatctcctgggagatcatgcgcccgcaaccttgatccgcctccgtgaccacgtagatcatcaaggaatctgatgaccgacccagttatgct

SEQ ID NO: 2508 - DNA, 55 bp, Kuusamo partiti-like virus
  source 1..55: mol_type = other DNA
aaaagcaaagacaatgatagggtcgttccactgatcgttttgggattaaacgacc

SEQ ID NO: 2509 - DNA, 53 bp, Lampyris noctiluca partitivirus-like virus 1
  source 1..53: mol_type = other DNA
ttgaaagcagcaagtcccgggtgtaaaacataggactaactacaccacaaccc

SEQ ID NO: 2510 - DNA, 121 bp, Lampyris noctiluca partitivirus-like virus 2
  source 1..121: mol_type = other DNA
taacacaccttttacggtcccgggggaatataaataggtgaccacgaacgtaacaagcccacccccctcccaacgacgtcgtcgtcgccggttcctccatcatcgacactcctggctctgc

SEQ ID NO: 2511 - DNA, 93 bp, Laodelphax striatella associated partitivirus
  source 1..93: mol_type = other DNA
aggagtgacaaatctctgcagttatcactgcatcttccgtgtatcggaaaacgagtgcaaagaatcctgtttatcaggatgaatgataaatct

SEQ ID NO: 2512 - DNA, 53 bp, Lasiodiplodia ziziphi partitivirus 1
  source 1..53: mol_type = other DNA
tcgcgcccaaccaaacaaacccaaccaaattcccttcactcctttctaagctg

SEQ ID NO: 2513 - DNA, 149 bp, Lentinula edodes partitivirus 2
  source 1..149: mol_type = other DNA
tcttccttttcatttcaataatttctaaattttatttaatggtgctagacatggttcgccatgatgtgtcccttctagagtcatagggctggcaatgacattttctttaacttcaaaccggttggaaccaaacctcgcagctaagtagg

SEQ ID NO: 2514 - DNA, 86 bp, Lentinula edodes partitivirus 2
  source 1..86: mol_type = other DNA
ctcaagacaccggtgtttttcctccgtttcttgtttttgctttaaccctcccccttaaaaaaaaaaaaaacaaaaaaaaaagaacc

SEQ ID NO: 2515 - DNA, 36 bp, Lentinula edodes partitivirus 3
  source 1..36: mol_type = other DNA
attggactatttctgatcttttcttaaaacctaaaa

SEQ ID NO: 2516 - DNA, 26 bp, Lentinula edodes partitivirus 4
  source 1..26: mol_type = other DNA
catcaacgaccaagcgttcgctggtg

SEQ ID NO: 2517 - DNA, 44 bp, Leuven Partiti-like virus 1
  source 1..44: mol_type = other DNA
tttgtatgtgaaaacaccctcgggacgctataaatatagagggg

SEQ ID NO: 2518 - DNA, 10 bp, Leuven Partiti-like virus 2
  source 1..10: mol_type = other DNA
ggcacttaag

SEQ ID NO: 2519 - DNA, 86 bp, Leuven Partiti-like virus 3
  source 1..86: mol_type = other DNA
ctttttcagtaagccctgaaatccgtttacggtccctggcaattttgctttcataacaacacacaacttttaaaactagaataggg

SEQ ID NO: 2520 - DNA, 28 bp, Leuven Partiti-like virus 4
  source 1..28: mol_type = other DNA
tgaaatggtaggagagaggtggcgtaaa

SEQ ID NO: 2521 - DNA, 48 bp, Leuven Partiti-like virus 5
  source 1..48: mol_type = other DNA
aacattattaatacctggtgcgcttaaatccagatgtgtcataaccgc

SEQ ID NO: 2522 - DNA, 232 bp, Lichen partiti-like RNA virus 1
  source 1..232: mol_type = other DNA
tcagtgaaactttagactgcagatcttttgttcattgtcattcatttattttatgatttgattgttatttcaattttcaatcagttactattttctttcaactaaagaaaaaatgatcaactaaaacttaaagcgaaagcgaaaaaaaaaaaattcgaaaaggttaaaaccttttaaaaaaattttttaaaaaaaaaaaagaaaaaaaacaaaagacccaaattaaagtccg

SEQ ID NO: 2523 - DNA, 68 bp, Lichen partiti-like RNA virus 2
  source 1..68: mol_type = other DNA
cttagagtataatctcacactccttaaataatctactcaaaataacccactctctctcgcaaagctgc

SEQ ID NO: 2524 - DNA, 89 bp, Lichen partiti-like RNA virus sp.
  source 1..89: mol_type = other DNA
acaacgccctaacgttaggataagtttagtgttttgttaaccacatttcaaaactgaaataaaaaaaaaaaacaaataaacagcggtct

SEQ ID NO: 2525 - DNA, 46 bp, Linepithema humile partiti-like virus 1
  source 1..46: mol_type = other DNA
cagtggctttgacgagtgtggaaagacacctccagggcaacccggg

SEQ ID NO: 2526 - DNA, 59 bp, Linepithema humile partiti-like virus 1
  source 1..59: mol_type = other DNA
agctatgtaagcgttttgacgagcgtggaaagacacctccggttcatccgggggggggt

SEQ ID NO: 2527 - DNA, 20 bp, Lippman partiti-like virus
  source 1..20: mol_type = other DNA
taaataagccctggggtggc

SEQ ID NO: 2528 - DNA, 43 bp, Lloydbraun partiti-like virus
  source 1..43: mol_type = other DNA
ccttcgggcttgtcgccgccagggcgacgcggatggggcctga

SEQ ID NO: 2529 - DNA, 77 bp, Macrophomina phaseolina partitivirus 1
  source 1..77: mol_type = other DNA
agagaggagcccactgaaaccgcttatagatgagtccaccttcaaccactcatctcaggggtatttcagcattggct

SEQ ID NO: 2530 - DNA, 61 bp, Macrophomina phaseolina partitivirus 2
  source 1..61: mol_type = other DNA
ggtgcttttcccacgtcttggttaattccacgtgtttcattcctacttggtgcaaaccaag

SEQ ID NO: 2531 - DNA, 54 bp, Magnaporthe grisea partitivirus 1
  source 1..54: mol_type = other DNA
gagtgacaatcttctgcagatatagcagagtcttacgtgtaaacgtggatgtga

SEQ ID NO: 2532 - DNA, 45 bp, Magnaporthe oryzae partitivirus 1
  source 1..45: mol_type = other DNA
ggaagtcttcggacagtcctttggtaaaacataaacaaaaaccaa

SEQ ID NO: 2533 - DNA, 53 bp, Magnaporthe oryzae partitivirus 2
  source 1..53: mol_type = other DNA
ggaagtcttcggacaatcctttggtaaaacataaacaaaaaccaaaaaaaaaa

SEQ ID NO: 2534 - DNA, 92 bp, Magnaporthe oryzae partitivirus 3
  source 1..92: mol_type = other DNA
gagtgacaatcttctgcagatatagcagagtcttacgtgtaaacgtggatgtgacagaaaccgtgtaaacggtctgtgaaatataaaatcca

SEQ ID NO: 2535 - DNA, 50 bp, Marigold cryptic virus
  source 1..50: mol_type = other DNA
gttgtaaattttctttcttaaatcttttaagcagagggctatttaccccc

SEQ ID NO: 2536 - DNA, 62 bp, Melon partitivirus
  source 1..62: mol_type = other DNA
gtttaatgtatatcattattaagctttctatctaaaatgtaatagacttcttaacgggaggc

SEQ ID NO: 2537 - DNA, 42 bp, Metarhizium brunneum partitivirus 1
  source 1..42: mol_type = other DNA
cgcccgtctttcctccctggtatggtactacccccttcgggg

SEQ ID NO: 2538 - DNA, 46 bp, Metarhizium majus partitivirus 1
  source 1..46: mol_type = other DNA
gtacaacacaaatctcgtatctcgatttgtatacaaaatcaagaca

SEQ ID NO: 2539 - DNA, 28 bp, Mischke partiti-like virus
  source 1..28: mol_type = other DNA
ttaaacgcatcgcctaaccctaatgggg

SEQ ID NO: 2540 - DNA, 60 bp, Monilinia partitivirus A
  source 1..60: mol_type = other DNA
cctaacagaaccaaaaaaattctaaaactattaaataaaaaaaaaaatttaaaaccctac

SEQ ID NO: 2541 - DNA, 77 bp, Morus alba cryptic virus
  source 1..77: mol_type = other DNA
tatgcgatccatcccgaccggggggaaggttctacatgaaccctccaaaaaaaaaaaaaaaaaaaaaaaaaaaaaaa

SEQ ID NO: 2542 - DNA, 82 bp, Neurospora crassa partitivirus 1
  source 1..82: mol_type = other DNA
tttccgtccctttatgtttagcaatgttaaactgctaattcccttaaaacataaaatctaaaaaaccaaaaaaaatcgaccc

SEQ ID NO: 2543 - DNA, 66 bp, Neurospora discreta partitivirus 1
  source 1..66: mol_type = other DNA
tttccgtccctttatgtttagcaacattaaactgctaattcccttaaaacataaaaacaaaaaaaa

SEQ ID NO: 2544 - DNA, 76 bp, Neurospora discreta partitivirus 2
  source 1..76: mol_type = other DNA
atctccgtctctttgttaattacctaacataataaaacaaaaaaaaacaataaaaattcaataaaatcgaccctgg

SEQ ID NO: 2545 - DNA, 84 bp, Neurospora discreta partitivirus 3
  source 1..84: mol_type = other DNA
gctaacgcttattctccttttgcttttaattttaaaatgaaaaaaaaataaacaaaacttaaataaatccaaaaaataaacccc

SEQ ID NO: 2546 - DNA, 100 bp, Neurospora discreta partitivirus 4
  source 1..100: mol_type = other DNA
accggttcaaagttttaccgctaagttacctgttcttttgttattcgaaaataaaaaacatttcaaaactataaaacaaaaaaacaaaaaacttttaaaa

SEQ ID NO: 2547 - DNA, 14 bp, Newman partiti-like virus
  source 1..14: mol_type = other DNA
gctaattgacagag

SEQ ID NO: 2548 - DNA, 191 bp, Nigrospora oryzae partitivirus 1
  source 1..191: mol_type = other DNA
gagtgttttcctcacagaggagccaaaccgtgtaaacgtgtgaggtttacgaagcagtttatctgttcgtgttaccaataatcacggtcattttcactattagccccgtgatagggtactctttagcttgttgttttcgtgggtcgtcactatcctcccacgacatcctaggatgtttcgacccctatagg

SEQ ID NO: 2549 - DNA, 75 bp, Nigrospora sphaerica partitivirus 1
  source 1..75: mol_type = other DNA
gagaataaacaaacgaacactgacctcagtggaatgagggctagatatgacaactagcataaataaaccaaaaaa

SEQ ID NO: 2550 - DNA, 118 bp, Norway partiti-like virus 1
  source 1..118: mol_type = other DNA
gctcagctgctttatatgctatttcttcctctatatttagcgcttcatggtacttgtacacattgtattcacatgtatataacaaaaggacacgaagggatcagagtctgatacccca

SEQ ID NO: 2551 - DNA, 47 bp, Panax cryptic virus 1
  source 1..47: mol_type = other DNA
atatataagtttaatatacgttctaagggaggctattacacccccac

SEQ ID NO: 2552 - DNA, 31 bp, Panax cryptic virus 2
  source 1..31: mol_type = other DNA
tacgctcccgtacggaatcgcggaagggtct

SEQ ID NO: 2553 - DNA, 1635 bp, Partiti-like adriusvirus
  source 1..1635: mol_type = other DNA
taagtcatatcacagtaaccacgtgatattagcttctggtgagttggtagcgctgggggtagtgggtagaatatatacctatctatgacacttagattacacgttcatcacagtgtcaatgcccgttaacgggaaagcgtaatgttggaatattacgtctatggtgctctgatcaagcacttaaattgctaagtttccaggcacagatgcgtaattctatagatagtaagacagaaatgaacacattctatcagagtttccaaccaaataaattctactcaaacgaatatccttatatgtactataaaaatcggatgaaatctagtatttcaaaatctaaatttaataatagaaatcctatgcgaaacaagtttaattataatcacaatggttctaatttaaaagcaacaagtgatctacaaaaacatgagttgagactaaaatgtttcagacgtaggaagcagacttcgtattccattatcgagggagtcccagctagaagttccagatttgttggtaaaatgaggtttagtgttaatatagattatagaagtctaagacaaggtatgtatagatacttcactaataatcagaatatagatcttagtaaaattcgatctattatacctgaacttggtattaaaacaggttcaagtagaaatgatgtcattacagttttaggttcttactatttgaatgaacttttactgttatcagcttattacatcgataattttattggtgaaatgcatcatataagatgcgggttaaacgaatctagaaaatacccaattggtcttattagattcatatcttttatgaatgtagatagtcgttatgttaacataccgggtactcaaaataatctttttattgaaggttctaagataaaaattgagtttgataaagcatcggataagcattttatgcccactgatgaattcgattttatgtctagactagaaaagttagtttatataactgacgttatagatccggatctaaacattcaatacaacttacttcttaataaaccattatttgaaggaatatttagctgtattgtggaggatgatgatgaaaattttatcattacccactcggatgagtttcctactgaatttgaagcatgcgcttcaattatgctcggatttaaatatgatatagaaggagttaacaatcgtcatattggagacgaattatatcatattcctaagtacttattaccgcatttgtcgtttaagttttgggaaggaatcctaggtaaagataaagtctcagaggttagcaagctcactgtttttgaaggagattactctggtgcagggaaatttatgaataatcccgaaagtgtttcagttatagatgagggtatggatatggcccccagtttatctggaaatttaaatgaacagataaatttatctcaggttagagaaagtaaagttgatgtttcaagacctcagaaaaacgataaggttcataagccagctgttaacaaaggcaaggaaccctaagtgaatgagtcctaactgagaaccgtctcgtacctaggtacgacctccagaagtaagaaaacttctctaaagagtcctctttagtcacctcgcacaaacgtgtatcttgacgagatgc

SEQ ID NO: 2554 - DNA, 1342 bp, Partiti-like alassinovirus
  source 1..1342: mol_type = other DNA
aagtgaattcggtgtatctcgctttagatgcatcgcgccgtcttggttagactgagtggcgtgagcgacggaatttttagatctatatttaaaagacatgttttctatattcaactcttgtttgaaaaatcttcctaatttaccaaactttattttacgtagcaaatctagacaactagtattaaatattaactattctttcgattccagattaataaaggaggttcttcgtgagcgtttaatgataaattcaattcaatgggattttaaaactgttcgaaattataactccatactcggagaaggacaactttcaagaaaagttctttgtgagcatttgtcatcttcacttattaataattttgaaaaagtattgctttacttattaaattaccctgaacgttttcgcgattatacacaattcggcctgtcagagatatggatgcctagatttctattacgcgttctgcaattagcaatgtgtccatatttgcaaccagtcttacacgttaacgatttgttatacgttaggtttaacttgccagaaaccgtttcttttgttaaaaggaaatatcgtttagacgaagttgtcggatttgttccgaaaggtcgagctgtaactacgcgaaaaggtggagattcttccacagttgagtctgtgtccgaagtaatcgtggagtgccctagtgattctgaattcattgatgcaataataatgttaacacatttgtcgaagactgctttccgaaattgttctgtcgaagttggaaaatatagtgatatggttcaatacaatagtcaagactttttaagttgtcttattcttagagatttcaattatgaaaaagatgaagtgtttgatttatattcaacaaaggatttaaccaaagagaatttgtttactaattttgtactaggatcttatttttccgcagttgacttaactgatgaagcgttttctgttgtgcggttaccgtttgaacgaattcaattgcttgaagaacttagattttacattgagtcagaattcaacgtgtcaagttccaatggcaatgaaaaatcggaggtaattactgaaactgtcgtttcggaaccgcagtcttttgaccttaaaccacagaaaggaaaaaatgattttaacaacaaaaaaggaaaacgtggtagaaatactaaaggataattgttctaaattcttttattcagttaattataacagcaactctcgcgtcattatattcttaaaaatctactggaggacaaatccagcgttgatgcagtggacccatagcgagtcgaacagtcgtctatgtgagaacttaaagtagccacctttaaggtccca

SEQ ID NO: 2555 - DNA, 1050 bp, Partiti-like lacotivirus
  source 1..1050: mol_type = other DNA
aagtggtttaaatttcagtattgacaattatgaattatactttgattgcgaaaccctacagatatattaacgaaactataaaaggattaattccagtgattaggaaaacaaaattaaattttaaactaggttttactacggatggtgttaaaataaaagagatattaacgagaagaattattgaattatcagagaattgggagttaactacttttagaaaattggagtttatctgtgagttaaatccaggaccaaggtcttctttacccacagtgatatcgacaatatattctaaaagttttttaactgtgcttaaagcttttttggacgatgaagatatggccgacaaaatttttgagagacggaatagtattacaaacttaccaaagattattttagatataatacaatttaaaaataatatacaaaaactgagagatatagatttagatatacttactgtaacggatgtcgagtattcaggttccaatatgatttgtaaaaattcggattacgaattgagaaacactttaggattaactacacaagcgaaagtcgaacagataaccgatatcagcatccaaaatgttttaaaaaatttaaacttactatgtagtttgagcaaaataatttcgccaaatactactgttatcattgatgacgtcaaagattttaaagaatgcagtagtgtaaattggttaaattttttgattgataagaatttaaatatttttgttaatgatcaaactaacttagaaagtttatttaattttatggcttttgggctcattttagaatgtgagagtgttgataaactaagcggttattggttggaatatgacataaactcgttagatgtagtgatgctaaaaaggatcgacaaattattgttcggaggaaaacatgaagcaactaaacaaaacatcgataaaccgaaaacaaaaggtatggataaaaacaaaactgtatcaactaaaaaataataatatacatgcgttaagtcttgtttacaccactttagataagacctggggactaattaacagcgtt

SEQ ID NO: 2556 - DNA, 13 bp, Partitivirus-like 2
  source 1..13: mol_type = other DNA
gggccccattcaa

SEQ ID NO: 2557 - DNA, 23 bp, Partitivirus-like 3
  source 1..23: mol_type = other DNA
gggccacattcaacctccccact

SEQ ID NO: 2558 - DNA, 52 bp, Partitivirus-like Culex mosquito virus
  source 1..52: mol_type = other DNA
taaagccgtgacgagcgtggaaagacacctccctgaaaggggcccccccccc

SEQ ID NO: 2559 - DNA, 90 bp, Penicillium aurantiogriseum partitivirus 1
  source 1..90: mol_type = other DNA
gagtgtatcctctgctgtgttaaacagcgcaattatttgtgtaaacaggaattgtgaacctcagtttatctgagaatattaacaaaatcc

SEQ ID NO: 2560 - DNA, 24 bp, Penicillium aurantiogriseum partitivirus 1-cp
  source 1..24: mol_type = other DNA
tgtactacttcgtcaaaacgattt

SEQ ID NO: 2561 - DNA, 23 bp, Penicillium brasilianum partitivirus 1
  source 1..23: mol_type = other DNA
gcatttctttcattagagtattg

SEQ ID NO: 2562 - DNA, 80 bp, Penicillium digitatum partitivirus 1
  source 1..80: mol_type = other DNA
taggagtgcctagcatatttgtgttagtgtaacgagagtttatctttcgtgtaacttaaacaatatctaaaaaaaaaaag

SEQ ID NO: 2563 - DNA, 83 bp, Pennypacker partiti-like virus
  source 1..83: mol_type = other DNA
tgatcccttccgcccttagcttaatggataaagcccaccattcgaaggtgaagattccggttcgagtccggaggggcaccccg

SEQ ID NO: 2564 - DNA, 43 bp, Persimmon cryptic virus
  source 1..43: mol_type = other DNA
gcagctcccgtaattttcgggaagggttcacataaccctgcct

SEQ ID NO: 2565 - DNA, 12 bp, Peterman partiti-like virus
  source 1..12: mol_type = other DNA
ggtgacggggag

SEQ ID NO: 2566 - DNA, 34 bp, Phlebiopsis gigantea partitivirus 1
  source 1..34: mol_type = other DNA
cttcacagttaacctttttgcttttacttctcac

SEQ ID NO: 2567 - DNA, 76 bp, Phoma matteuciicola partitivirus 1
  source 1..76: mol_type = other DNA
aaggaggaacccactgaaatctatgacgtcataatttagttacgatactatactttgacagagaggttatcacggt

SEQ ID NO: 2568 - DNA, 88 bp, Phomopsis asparagi partitivirus 1
  source 1..88: mol_type = other DNA
gagtgacaagtccagtggaaactggcatccatctgtttatcagaggattctgtgactggtccgtgtaaacggaaacacaacaaaatcc

SEQ ID NO: 2569 - DNA, 60 bp, Phomopsis vexans partitivirus 1
  source 1..60: mol_type = other DNA
ttagttcatagcaacctgaaatgaaattaggttatcgctgatagaatcagctaactaact

SEQ ID NO: 2570 - DNA, 75 bp, Phyllosticta citriasiana partitivirus 1
  source 1..75: mol_type = other DNA
agtgtgtcgccctgtgccgtgttaacggatcttgcggttctcgcggatcttgtgtcctcaggtgtatacctgtag

SEQ ID NO: 2571 - DNA, 18 bp, Picoa juniperi partitivirus 1
  source 1..18: mol_type = other DNA
atctccatcacgtctttc

SEQ ID NO: 2572 - DNA, 111 bp, Picoa juniperi partitivirus 2
  source 1..111: mol_type = other DNA
tgtaatattaatatcgtcttagaatatttcttttaaaatctaaaaaattaaaaaaaaaaaaaaaaaaaaataaaaagaaaaaaaaccagataaagaaatggatttataggg

SEQ ID NO: 2573 - DNA, 36 bp, Picoa juniperi partitivirus 3
  source 1..36: mol_type = other DNA
atctccatcactcttttctttaattataaaatttat

SEQ ID NO: 2574 - DNA, 59 bp, Pistacia cryptic virus
  source 1..59: mol_type = other DNA
ataaatttagaattttacaatttttaagtttgtttgcatatacctttcttacgagaaat

SEQ ID NO: 2575 - DNA, 425 bp, Pittosporum cryptic virus-1
  source 1..425: mol_type = other DNA
atgtatcgctagaggtcacattaaaaccccctcttagtagcaaatattcaaatgagaactttgaaggccgaagaggggaaaggttccatgtgaacggcacttgcacatgggttagtcggtcctaagagacgggggaagcccgtcagatagcgcgttttgcgcgtacttcgaaagggaatcgggttaaaattcctgaaccgggacgtggcggctgacggcaacgttagggagtccggagacgtcggcgggggcctcgggaagagttatcttttctgtttaacagcctgcccaccctggaaacggctcagccggaggtagggtccagcagctggaagagcaccgcacgtcgcgtggtgtccggtgcgcccccggcgatccttgaaaatccggaggaccgagtgcctatcacgcccggtcgtactcat

SEQ ID NO: 2576 - DNA, 41 bp, Plasmopara viticola lesion associated Partiti-like 1
  source 1..41: mol_type = other DNA
aaactagttttatactagcgtaggtatgcgaagaatccccc

SEQ ID NO: 2577 - DNA, 34 bp, Plasmopara viticola lesion associated Partiti-like 2
  source 1..34: mol_type = other DNA
tgatcttcaacagctagttaaggcttaccctccc

SEQ ID NO: 2578 - DNA, 58 bp, Plasmopara viticola lesion associated Partitivirus 1
  source 1..58: mol_type = other DNA
gagtgttcttctgcagcaagtgcaggcattttcatgtatatcatgaggtgtgcagact

SEQ ID NO: 2579 - DNA, 56 bp, Plasmopara viticola lesion associated Partitivirus 10
  source 1..56: mol_type = other DNA
gagtgactctaacagtagagtgaatcatatttatcagtgaaactgaggtgtgtgac

SEQ ID NO: 2580 - DNA, 80 bp, Plasmopara viticola lesion associated Partitivirus 3
  source 1..80: mol_type = other DNA
tagcaggaatccactgaaacctatgaatagttagtttacaatactatactatgaggggtaatcacgattcaacacgatca

SEQ ID NO: 2581 - DNA, 68 bp, Plasmopara viticola lesion associated Partitivirus 4
  source 1..68: mol_type = other DNA
agggaggaatccacagaaacctatgattaggtagatataacaactacactatgaggtgtactctgtac

SEQ ID NO: 2582 - DNA, 96 bp, Plasmopara viticola lesion associated Partitivirus 6
  source 1..96: mol_type = other DNA
gaaaagtttcggtgaccccgattctttttcttttcaaatattcttctaataacaatattacaaaaaaaaaaaaaaatgccaagatcccactttctt

SEQ ID NO: 2583 - DNA, 133 bp, Plasmopara viticola lesion associated Partitivirus 7
  source 1..133: mol_type = other DNA
catggtgtaattttctaccaagtgcttcttttaaaaagatgtaactgtagatattacaatccgatgatgtaattctcattaaatgagaataatttcctccgaaactttttaaaaaccactaaaaaaaaacgcc

SEQ ID NO: 2584 - DNA, 19 bp, Plasmopara viticola lesion associated Partitivirus 8
  source 1..19: mol_type = other DNA
atccgcaccccaagtgccg

SEQ ID NO: 2585 - DNA, 51 bp, Plasmopara viticola lesion associated Partitivirus 9
  source 1..51: mol_type = other DNA
gtcttcctaccataagcagttttttttctacctaaaacttctacaaaaatg

SEQ ID NO: 2586 - DNA, 90 bp, Poaceae Liege partitivirus 14
  source 1..90: mol_type = other DNA
tttactttgtaatttacttattgtaatttccttatgcttgtttaggagaggctaatataaccacaccctgcgacagcgttctggctggtt

SEQ ID NO: 2587 - DNA, 71 bp, Poaceae Liege partitivirus 15
  source 1..71: mol_type = other DNA
taaagaacctttccgaattttctaatttcggttgacattaaattactatttgtattataactaaactttgc

SEQ ID NO: 2588 - DNA, 114 bp, Poaceae Liege partitivirus 5
  source 1..114: mol_type = other DNA
cttatgtaatgttcattctttattataagtgccttgcataaacaacgtgattcactcatggtttatgctagacacttataataaagaatgaacattacataagttacattacat

SEQ ID NO: 2589 - DNA, 20 bp, Poaceae Liege partitivirus 6
  source 1..20: mol_type = other DNA
gtttaagacgtatttaaacg

SEQ ID NO: 2590 - DNA, 128 bp, Poaceae Liege partitivirus 9
  source 1..128: mol_type = other DNA
atgaactaatgttgtttttcagttagaataaaaccctttttaagagatccgttcgtaagaatgatctcctaaccccttaaacaaaccaatcaatcatatgattgtcctggagccagagtctccacgct

SEQ ID NO: 2591 - DNA, 14 bp, Podosphaera partitivirus ptbx-09
  source 1..14: mol_type = other DNA
ttgctgcttggtca

SEQ ID NO: 2592 - DNA, 123 bp, Podosphaera prunicola partitivirus 1
  source 1..123: mol_type = other DNA
ttgagagtgactctcttgatctttagttttgattcttaagcgaatcattattaatcaatagaaaaataattaaaaatcaaaataaaaatcaaaaaaaataaaccaacacagccagtaggaaac

SEQ ID NO: 2593 - DNA, 141 bp, Podosphaera prunicola partitivirus 2
  source 1..141: mol_type = other DNA
ttggtacgtgacgtccattttctttttttatttcattttgctgttcttgcattttatttatttataataaaaaaaaaaaaaaaaaatttaaaagaacgacgcctaaaggcgtttaaaaaaattaaaaaaaaaaaaaaaaaa

SEQ ID NO: 2594 - DNA, 36 bp, Podosphaera prunicola partitivirus 3
  source 1..36: mol_type = other DNA
atgctgtttggtcatttaaataaataaaaaaaaaaa

SEQ ID NO: 2595 - DNA, 114 bp, Podosphaera prunicola partitivirus 4
  source 1..114: mol_type = other DNA
gctacttttgccgttaatatatttgacatttacactgttaagtaataacgtataaattttatataaaattttttatcaaaactaaacaaaaaactaaataaattaaaaaaaaaa

SEQ ID NO: 2596 - DNA, 112 bp, Polygonatum partitivirus 1
  source 1..112: mol_type = other DNA
aaatattgtttgcagtgttagataagctcggttttggtaattttgtcctcaaaaaggacgatgttttttaaaacaaaacatccaaaaaaactacaaaaacccaaaagtccat

SEQ ID NO: 2597 - DNA, 35 bp, Polygonatum partitivirus 2
  source 1..35: mol_type = other DNA
tgttttatgtaaagacgtggaaggtaatacaaaac

SEQ ID NO: 2598 - DNA, 11 bp, Praha partiti-like virus 1
  source 1..11: mol_type = other DNA
agcgtatcgat

SEQ ID NO: 2599 - DNA, 72 bp, Pseudogymnoascus destructans partitivirus 1-pa
  source 1..72: mol_type = other DNA
gagtgacaaacaatcgcagtgatgtgatgtgaaacatacgtttaaatacgtgtgtgaaaaacaaaaacaaac

SEQ ID NO: 2600 - DNA, 54 bp, Pseudogymnoascus destructans partitivirus-pa
  source 1..54: mol_type = other DNA
gagtgacaaacaatcgcagtgatgtgatgtgaaacatacgtttaaatacgtgtg

SEQ ID NO: 2601 - DNA, 39 bp, Puddy partiti-like virus
  source 1..39: mol_type = other DNA
agtacttgtatagcctctcccggggggcgagtgcgtgag

SEQ ID NO: 2602 - DNA, 69 bp, Radish yellow edge virus
  source 1..69: mol_type = other DNA
ttcttggttttcttaggaaaagaaggtaaaagcttagaaaaagtaatacaataaaattgtaaatttttc

SEQ ID NO: 2603 - DNA, 74 bp, Raphanus sativus cryptic virus 1
  source 1..74: mol_type = other DNA
atgattaattttagaattattgtaaaactcaatattctgtaatgatctctctaaaaaaaaaataaaataaaacc

SEQ ID NO: 2604 - DNA, 105 bp, Raphanus sativus cryptic virus 2
  source 1..105: mol_type = other DNA
cactatttaataagttactctttctcaataaaagtttaaaatttaaattgtgctgcgtgtactattacagtagtaataagttcatgcagtacaataacaaatgtc

SEQ ID NO: 2605 - DNA, 63 bp, Raphanus sativus cryptic virus 3
  source 1..63: mol_type = other DNA
tttacatttaagttatttaaagttttattaataagacgtggaggttacatttattttccctcc

SEQ ID NO: 2606 - DNA, 42 bp, Raphanus sativus cryptic virus 4
  source 1..42: mol_type = other DNA
aagctgatcagctttatttgttttaattttttaaaaaaaaaa

SEQ ID NO: 2607 - DNA, 78 bp, Raphanus sativus partitivirus 1
  source 1..78: mol_type = other DNA
gtttaggacgttatttttatttatgacgttcgatttacccttggtcaatgtcaaaaatttaaaataataaaaattaga

SEQ ID NO: 2608 - DNA, 51 bp, Red clover cryptic virus 1
  source 1..51: mol_type = other DNA
aagccgatcgctttgtttgtttctttaaattaattaaaaaaaaaaaaaaaa

SEQ ID NO: 2609 - DNA, 64 bp, Red panda associated partitivirus
  source 1..64: mol_type = other DNA
tatttgccgtttggtttgttttctgtttacagattccacttccttcatttatggtataataaca

SEQ ID NO: 2610 - DNA, 67 bp, Rhizoctonia fumigata partitivirus
  source 1..67: mol_type = other DNA
gtattttggtacattttctatttttaaaaaaaaaaaaaaaaaaaaagaaaaaaaaaaaaaaataccc

SEQ ID NO: 2611 - DNA, 83 bp, Rhizoctonia oryzae-sativae partitivirus 1
  source 1..83: mol_type = other DNA
acggctcggttttttccaatttgtttcggattttaaccctaaaaaaaaaaaaaaagaagaaaacaaaaaaaaaaaaaaaaaaa

SEQ ID NO: 2612 - DNA, 93 bp, Rhizoctonia oryzae-sativae partitivirus 1
  source 1..93: mol_type = other DNA
acagctcggttttttttctgagttttcagattttaacctattttaaaaaaaaaaacaaaaaagaaaaaaaaaaaaaaaaaaaaaaaataaagt

SEQ ID NO: 2613 - DNA, 54 bp, Rhizoctonia oryzae-sativae partitivirus 2
  source 1..54: mol_type = other DNA
gttttgtgctctttttctattttttaaaaaaaaaaaaaaaaaagagcacaaaac

SEQ ID NO: 2614 - DNA, 57 bp, Rhizoctonia oryzae-sativae partitivirus 3
  source 1..57: mol_type = other DNA
gtattttggtacattttctatttttaaaaaaaaaaaaaaaaaagaaaaaaaaaaaaa

SEQ ID NO: 2615 - DNA, 68 bp, Rhizoctonia oryzae-sativae partitivirus 4
  source 1..68: mol_type = other DNA
aaatcgggtttttttttttttgtctgtatacttaaaataaaacaacaacaaaaaaaaaaaaaaaaaaa

SEQ ID NO: 2616 - DNA, 78 bp, Rhizoctonia oryzae-sativae partitivirus 5
  source 1..78: mol_type = other DNA
gattttttctgcataattttttttttcaaaaaaagaaaaaaaaatgaaaaaaaaaaagtaaaaacaaaaaaaaaaata

SEQ ID NO: 2617 - DNA, 73 bp, Rhizoctonia oryzae-sativae partitivirus 6
  source 1..73: mol_type = other DNA
tcgtttagtttgtttctttaaagcgtatattttctaaacaactccatacgaaaaaaaaaaaaaaaaaaattgc

SEQ ID NO: 2618 - DNA, 80 bp, Rhizoctonia solani partitivirus 10
  source 1..80: mol_type = other DNA
ctgtgaaatgcttttctttttttttaatcaaacaaaacaaaataaacagaaaaaaaaaaaaaaaaaaaaaaaaaaaaaaa

SEQ ID NO: 2619 - DNA, 93 bp, Rhizoctonia solani partitivirus 11
  source 1..93: mol_type = other DNA
ttctacctgacaagtagttttcttttatcttctcgaattttactattttattttcaaaaagacaaaaaaaaaaaaaaaaaaaaaaaaaaaaaa

SEQ ID NO: 2620 - DNA, 85 bp, Rhizoctonia solani partitivirus 12
  source 1..85: mol_type = other DNA
tgtggtgggtagtaagtagtaactgttgtcgttgctttaaaatcgttgggaggttcagaacgagatgttgcgcgtaaagtcgata

SEQ ID NO: 2621 - DNA, 52 bp, Rhizoctonia solani partitivirus 13
  source 1..52: mol_type = other DNA
tctgacctgaccggtcattttctttttctatgtattttcaaatccaaagcgc

SEQ ID NO: 2622 - DNA, 23 bp, Rhizoctonia solani partitivirus 14
  source 1..23: mol_type = other DNA
agctttgcatatgttttattaat

SEQ ID NO: 2623 - DNA, 17 bp, Rhizoctonia solani partitivirus 15
  source 1..17: mol_type = other DNA
tcattcaatctcagccc

SEQ ID NO: 2624 - DNA, 65 bp, Rhizoctonia solani partitivirus 2
  source 1..65: mol_type = other DNA
gtcgtgagcacttttattttatttattaaaaaaaaaaaaaaaataaaaaaaaaaaaaaaaaactc

SEQ ID NO: 2625 - DNA, 19 bp, Rhizoctonia solani partitivirus 433
  source 1..19: mol_type = other DNA
ttttcccgtacagtaaatt

SEQ ID NO: 2626 - DNA, 104 bp, Rhizoctonia solani partitivirus 6
  source 1..104: mol_type = other DNA
tttggtccatcatttgtacaatttcctttttttatttataataaattataaaaataaaaaaaaaaaaaaaattaaaaaaaacaaaacctcaataaaaagaaccc

SEQ ID NO: 2627 - DNA, 55 bp, Rhizoctonia solani partitivirus 7
  source 1..55: mol_type = other DNA
gtcttatggttctagaattctacggcaaaacaaaacaacaaaaaaaaaaaaaatc

SEQ ID NO: 2628 - DNA, 107 bp, Rhizoctonia solani partitivirus 8
  source 1..107: mol_type = other DNA
tcaatttatttggtcacttttaccatttaaatcgcgttctttttttcttttaaaaaaaaaaaaaaaaaaaaaaaaaaaaaaaaaacaaaatttaaaaaaaaaaaccc

SEQ ID NO: 2629 - DNA, 99 bp, Rhizoctonia solani partitivirus 9
  source 1..99: mol_type = other DNA
ttatgatccatcatatgcatctttttttctttctttcaattaaaaaaaaaaaaaaaaaaaattcaaaaaaaaaacaaaatcattaataaaaagaaccca

SEQ ID NO: 2630 - DNA, 63 bp, Rhizoctonia solani partitivirus virus 3
  source 1..63: mol_type = other DNA
aaatcaggtttttgtgtctgtgtatctttttttaaaacataattcacaaaaaaaaaaaaaaaa

SEQ ID NO: 2631 - DNA, 58 bp, Rhizoctonia solani partitivirus virus 4
  source 1..58: mol_type = other DNA
gagtggctttgtttttttaattatttataaataaaaaaaaaaaaaacaaaaaaaaaaa

SEQ ID NO: 2632 - DNA, 69 bp, Rhizoctonia solani partitivirus virus 5
  source 1..69: mol_type = other DNA
ccgtttgtttgttccctgcgagtatggtgtttcttttcaaacgtaaaaaaaaaaaaaaaaaaaaatagc

SEQ ID NO: 2633 - DNA, 31 bp, Rhodiola cryptic virus 1
  source 1..31: mol_type = other DNA
attagtttattttaatgaacttatttatgca

SEQ ID NO: 2634 - DNA, 71 bp, Rhodiola cryptic virus 2
  source 1..71: mol_type = other DNA
ttacaatgtaattaatgcagacttaatgaacggtctattaggaggcttacaccccctatcttttaaaaaaa

SEQ ID NO: 2635 - DNA, 141 bp, Rose cryptic virus 1
  source 1..141: mol_type = other DNA
aattattttatggacaataatttagttttcttcattgtcacttaaccgattgcacacctatctttaattaatagggtgcccccgggttaggagattagactttaagtctctcctaacccacctgatcaaaaaaaaaaaaaa

SEQ ID NO: 2636 - DNA, 127 bp, Rose cryptic virus 1
  source 1..127: mol_type = other DNA
aattattttatagacaataatctagttttcttcattgtcacttaaccgattgcacacctatctttaattaatagggtgcccccgggttaggagattagactttaagtctctcctaacccacctgatc

SEQ ID NO: 2637 - DNA, 79 bp, Rose partitivirus
  source 1..79: mol_type = other DNA
gtttaagacgttattttaggcgtctcctctcttaagtaaaataaaattaaaaaggaaaagcctaaataaaaaaaaagat

SEQ ID NO: 2638 - DNA, 67 bp, Rosellinia necatrix partitivirus 10
  source 1..67: mol_type = other DNA
caactgctattgctataagaaattataattttatttgtttatttcaaaaaaaaaaaaaaaaaaaaaa

SEQ ID NO: 2639 - DNA, 118 bp, Rosellinia necatrix partitivirus 11
  source 1..118: mol_type = other DNA
tcctacccggatgccatctacatgctttaccttttttttcttttcttttgattttttaaaaaaaaaaaaaaaaaaaaaaaaaaaaaaaaaaaacaaaatcccaaaaaaaaaaacccaa

SEQ ID NO: 2640 - DNA, 89 bp, Rosellinia necatrix partitivirus 12
  source 1..89: mol_type = other DNA
tcttaatcccgcagattaattgttttcttttctttacaattttaataaaaaaaaaaaaaaaaaaaaaaaaaaaaacaaaaaaaaaaacc

SEQ ID NO: 2641 - DNA, 484 bp, Rosellinia necatrix partitivirus 13
  source 1..484: mol_type = other DNA
aatttaggaacaaaggttgtatgccctatcgtgatccacttgtcctgcttgctcaactacgtcaccctgaacgttcacacaaattgagtatcctcaaggcccgtgccgttggtatagcttatgctaactgcggttctgacccccgagtttaccgaatttgcgaacacatttttcgggaactagactctcgcggaattaactctaaccctgctgaattgccggatcagattaattttatgaacaagttcttacacgttaagacccacattaacgtcgaaaaattccccagctatttcgagacgactcgtcatctccttgatgaacgaactgaactaccttctcgtacctactggcctcgttcgcacttcatcggtatccccggtcgaattgcccatacccgattcgaggattaagtttatttataatttcttaaaaaaaaaaaaaaaaattaaaaaaaaaaacaaaatccaaaaaaaaaaaattt

SEQ ID NO: 2642 - DNA, 94 bp, Rosellinia necatrix partitivirus 14
  source 1..94: mol_type = other DNA
attgttttaaaatgcaattctcagataactcgtatgctccgaaaattcgcaaaaaaaattttaaaacttataaaaattcaaaaaaataatccaa

SEQ ID NO: 2643 - DNA, 185 bp, Rosellinia necatrix partitivirus 15
  source 1..185: mol_type = other DNA
cgttacctggactttgtttattttctagtattaatttttatttctttttttctagacccaattttttacaaaaaaaaaaaaaaaaaaaaaaaaaaaaaaaaaaaaaaaaaaaaaaaaaaaaaaaaaaaaaaaaaaaaaccttctcctaaaagagacccatcttcaatacctttctgacacatgca

SEQ ID NO: 2644 - DNA, 102 bp, Rosellinia necatrix partitivirus 16
  source 1..102: mol_type = other DNA
gttatctattacctgaaaaggtttgatactaattattttactcttaaccaaacgttaaaaaaaaaaaaataaaaatattataaaaccaaaaaaaaaatatct

SEQ ID NO: 2645 - DNA, 54 bp, Rosellinia necatrix partitivirus 17
  source 1..54: mol_type = other DNA
tgttttccggaatcaccaccctacaaaaaaaaaaaaaaaaaaaaaaaaaaatcc

SEQ ID NO: 2646 - DNA, 99 bp, Rosellinia necatrix partitivirus 18
  source 1..99: mol_type = other DNA
ttggtttatgattttcatttcattatgttttcattttctcctgacaaaatcgaaaaaaaaaaaaaaaaaaaatttaaataaaaccaaaaaaaaatatcc

SEQ ID NO: 2647 - DNA, 82 bp, Rosellinia necatrix partitivirus 19
  source 1..82: mol_type = other DNA
agtgttgaatttttacacattttaaattcaaaaaaaaaaaaaaaaaaattaaaaatatataaaaatccaaaaaaaaaaaagt

SEQ ID NO: 2648 - DNA, 102 bp, Rosellinia necatrix partitivirus 20
  source 1..102: mol_type = other DNA
acttaaccttttgtcaagtcatttgttccatgcaattttttttctttttaaaaaaaaaaaaaaaaaaaaaaaaaaaaaaaacaaaacccaaaaaaaaaaccc

SEQ ID NO: 2649 - DNA, 109 bp, Rosellinia necatrix partitivirus 21
  source 1..109: mol_type = other DNA
ttttaccattcgtttagtctgtttaacacacattcttttacgatccgttttataaaaaaaaactaaatccaaaaaaataaaaaaacaaacaaaacaaaaaaaaaaagtc

SEQ ID NO: 2650 - DNA, 84 bp, Rosellinia necatrix partitivirus 22
  source 1..84: mol_type = other DNA
gattttttctgacttatattttttcaaaacttttttaaaaaaaaaaaaaaaaaaaaaaaatacaaaaacaaaaaaaaaaataaa

SEQ ID NO: 2651 - DNA, 73 bp, Rosellinia necatrix partitivirus 23
  source 1..73: mol_type = other DNA
atcactgttctcgatgaacataaataataatcgaatgtctatgcaacacatttatgcccacgctccttaatat

SEQ ID NO: 2652 - DNA, 47 bp, Rosellinia necatrix partitivirus 24
  source 1..47: mol_type = other DNA
tcccggctctccttgttctattttgttctttaatatcaaaatataaa

SEQ ID NO: 2653 - DNA, 92 bp, Rosellinia necatrix partitivirus 25
  source 1..92: mol_type = other DNA
tttgctgttttggatcgtatgcttttctcgtcaatttatgccttatgcttaaactcacataaaaaaaaaataaataaatctcataaaaagat

SEQ ID NO: 2654 - DNA, 81 bp, Rosellinia necatrix partitivirus 26
  source 1..81: mol_type = other DNA
taaactttcttttgttcatccgatcaggtcagaaacgtgttgatcacgtttaaaaaaaaaaaaaacaaaaaacaaaaaaaa

SEQ ID NO: 2655 - DNA, 109 bp, Rosellinia necatrix partitivirus 3
  source 1..109: mol_type = other DNA
tttgcttatacgtataagttttacgtttataggtttgttcttttctttctttttaaaaaaaaaaaaaaaaaaaaaaaaaaaaaaaaaacaaaactacaaaaaaaaatcg

SEQ ID NO: 2656 - DNA, 98 bp, Rosellinia necatrix partitivirus 4
  source 1..98: mol_type = other DNA
tgttaccgttttagattttattcaacataatttttttcactgttttaaaacaaaaaaaaaaaaaaaaaaaaaaataaaaaccaaaaaaaaacaaagct

SEQ ID NO: 2657 - DNA, 69 bp, Rosellinia necatrix partitivirus 5
  source 1..69: mol_type = other DNA
gattttttctgcaccttttaaatcaacgcaaataaaaaaaaaaaatttaaaatgtaaaaaaacaaaaaa

SEQ ID NO: 2658 - DNA, 55 bp, Rosellinia necatrix partitivirus 7
  source 1..55: mol_type = other DNA
tcagtttggaagtttttctgcaattgtattttatgttattcttacacagttttac

SEQ ID NO: 2659 - DNA, 85 bp, Rosellinia necatrix partitivirus 8
  source 1..85: mol_type = other DNA
gtctccatcgctttatttattgtgtaaaatacaaaatcacaaaaaaaaataaaaaacaaaaaaaaaattctaaaaaaatcgaccc

SEQ ID NO: 2660 - DNA, 41 bp, Rosellinia necatrix partitivirus 9
  source 1..41: mol_type = other DNA
tttgagtatttttatgataaatttaaaaaaaaaaaaaaaaa

SEQ ID NO: 2661 - DNA, 85 bp, Sacamano partiti-like virus
  source 1..85: mol_type = other DNA
ttcagcccagaggctggtatttagagatgtattatctaaagatctaagagatcaatcatgggttttaatatataaaaaaaaaaaa

SEQ ID NO: 2662 - DNA, 117 bp, Saccharomyces cerevisiae partitivirus 3
  source 1..117: mol_type = other DNA
agcaccttggataatcgagcaatacaaaggtttcagtgcgtaatccttaaagacgtcatacccgccggaaggttagaacggggctaccccgttctaaccttccggcgggtatgacgt

SEQ ID NO: 2663 - DNA, 105 bp, Sarcosphaera coronaria partitivirus
  source 1..105: mol_type = other DNA
tttttaccaaccgctttcatttagtttgaaatgttccgtttaattataatcccaacaaaaccaaataaaacaaaaaaaaaaacccccctatgtatgagctacccc

SEQ ID NO: 2664 - DNA, 79 bp, Scaphoideus titanus-associated partiti-like virus 1
  source 1..79: mol_type = other DNA
gacacttttgtatttgtttgtttaataaagattgaaatcggagttgtactctactacacagtagactacaagcccgatt

SEQ ID NO: 2665 - DNA, 127 bp, Sclerotinia sclerotiorum partitivirus 1
  source 1..127: mol_type = other DNA
aacaagtcactccttcacctcgttaattatacgttttaggtagtacatgctcaatctttgactcatactcattttgatttaaaacaaaaaaaaaaaaaaaaaaattaaaataaacctaataaaataa

SEQ ID NO: 2666 - DNA, 105 bp, Sclerotinia sclerotiorum partitivirus 3
  source 1..105: mol_type = other DNA
taatactagcttttcttcgtcttaagcgacaacaaacacaatcatggtttatccatctagagtgtcctactcactggtttatccagttagaagttaataacaata

SEQ ID NO: 2667 - DNA, 46 bp, Sclerotinia sclerotiorum partitivirus S
  source 1..46: mol_type = other DNA
gccgaaagctcggtaagttatataattgaaaaaaaaaaaaaaaaaa

SEQ ID NO: 2668 - DNA, 82 bp, Scutellospora partitivirus A
  source 1..82: mol_type = other DNA
ttgacaaaccgcacgctcacttttgctgttttgtttctgttctttaatttaatcaaaaaaaaaaaaaaaaaaaaaaaaaaaa

SEQ ID NO: 2669 - DNA, 117 bp, Scutellospora partitivirus B
  source 1..117: mol_type = other DNA
agactcacactcatttgttctttattcgtgttattctcttcgagcttaacattctttatttcaaatcaaaaaaaaaaaaaaaaaaaaaaaaaaaaaaaaaaaaaaaaaaaaaaaaaa

SEQ ID NO: 2670 - DNA, 62 bp, Setosphaeria turcica partitivirus 1
  source 1..62: mol_type = other DNA
acagttcagtttgatttactgaaattcataaattctaaaaaaatcaaaaaaaaaataaaagt

SEQ ID NO: 2671 - DNA, 13 bp, signal crayfish associated partiti-like virus 1
  source 1..13: mol_type = other DNA
tggtttaaacggc

SEQ ID NO: 2672 - DNA, 42 bp, Sinapis alba cryptic virus 1
  source 1..42: mol_type = other DNA
ctttatttataaacgctttggaggctttacaaaccccctact

SEQ ID NO: 2673 - DNA, 73 bp, Sodiomyces alkalinus partitivirus 1
  source 1..73: mol_type = other DNA
atctccgtcgcctttatttctcttttgtaaataaaaaaaacaaaaaaaaaaaaaaaaaaaaattaaaattcaa

SEQ ID NO: 2674 - DNA, 68 bp, Sodiomyces alkalinus partitivirus 2
  source 1..68: mol_type = other DNA
gagtgttactcctgcagaagtagccgtttatcggcgtttccgtgtatacggggattctacttgcaaaa

SEQ ID NO: 2675 - DNA, 129 bp, Sophora japonica powdery mildew-associated partitivirus
  source 1..129: mol_type = other DNA
ttggtatgtgtactccgttttcttttcagtttattatttttgctaatctcgcattttttttatttataaaacaaaaaaaaaaaaatttaaaaagatatctacataagtagattaaataattcacaaaaa

SEQ ID NO: 2676 - DNA, 43 bp, Soufli partiti-like virus
  source 1..43: mol_type = other DNA
tatgattttggtgacgagcgtggaaagacacctccctacgggg

SEQ ID NO: 2677 - DNA, 104 bp, Soybean leaf-associated partitivirus 1
  source 1..104: mol_type = other DNA
tttctagtgatcactagtttgtttctctgtactatgataatttcaatgtatataaaaattaaaattacaaaaaaaataaaaaaaaaaaaaaaaacccccgcctg

SEQ ID NO: 2678 - DNA, 61 bp, Soybean leaf-associated partitivirus 2
  source 1..61: mol_type = other DNA
caatttgactagagtcaattttttgttttttttagtatttcactttgtactttaaggacaa

SEQ ID NO: 2679 - DNA, 58 bp, Soybean thrips partiti-like virus 2
  source 1..58: mol_type = other DNA
gtcgctagactgaataagtctcaggcccgggtaaaatcaataggccttatcccacaac

SEQ ID NO: 2680 - DNA, 743 bp, Soybean thrips partiti-like virus 3
  source 1..743: mol_type = other DNA
tgtgtagttgaacgtagatcgaccgtggcggggcgcggcgcgggggcccaagattgatggatgcctgcacctgacacctgacggcgccgcgtcggcctgcgcgccgttgtgcgccgctgcacacgacaatctcagaggcactttgtgctatccgcgaccccacacggtgagaaataatcgcgtagagttacgggaaaaaaataatttccatgacagcatgtcatttgggttacaaaatatatttttttgttacgagaattattttttttaacagtatgggtagactttttttttgacgagcaaagagttggttatcgtaaatttacgaccgcgttcgtcgtcatgaacagttttttcgtaaccccgtttcacagtgtggcggccccagggctgctcggtgtgcataccaggaggtgcccctctcgcctgcactgcaagcaccccctcctcctcctcctcgccgtcgaccctgacgccagcctgctcctaccccccgcgcgcgcgcgtgtactcgcggagacggcgaagaaacattcaatatttaccgtcttccattcggcgcgctccggcggcccgacccgcgccgagcgcgactaaaaccatctcgtctcgtcaccaactgattccctaacggtggtgacgtcgccgaaatcacactggagctccgtggagacgcggagagcagagaaaagtttgcttaactcgacgttaagcctagcgttcgccggagagcgttagccctg

SEQ ID NO: 2681 - DNA, 41 bp, Soybean thrips partiti-like virus 4
  source 1..41: mol_type = other DNA
tatatatgacttcacggtaccaaaaggtttaaaggagggcc

SEQ ID NO: 2682 - DNA, 37 bp, Soybean thrips partiti-like virus 5
  source 1..37: mol_type = other DNA
gcttgccatcaagctggcgcattataaataagctgag

SEQ ID NO: 2683 - DNA, 71 bp, Soybean thrips partiti-like virus 6
  source 1..71: mol_type = other DNA
ttcgtagaatacgtaggttgtagaacttatctcttatatacttgtaagagatggctagttccaggctcaat

SEQ ID NO: 2684 - DNA, 93 bp, Soybean thrips partiti-like virus 7
  source 1..93: mol_type = other DNA
tgggtagtggacggggcgcctaataaataccggtatcatccggcgcctattttaaattttttttacttatttatttctattcttttacttgct

SEQ ID NO: 2685 - DNA, 95 bp, Soybean thrips partiti-like virus 8
  source 1..95: mol_type = other DNA
ttattttaaacgcggttaaccgtaccgttttgaagttttattttagtattaatcaaacaaagatttaaaaattttaaaaaaaaaaataaaacccc

SEQ ID NO: 2686 - DNA, 43 bp, Soybean thrips partiti-like virus 9
  source 1..43: mol_type = other DNA
attaattaatattaagtcaagagacaacttgtaaaaaccccac

SEQ ID NO: 2687 - DNA, 35 bp, Spinach cryptic virus 1; identical to SEQ ID NO: 697
  source 1..35: mol_type = other DNA

SEQ ID NO: 2688 - DNA, 126 bp, Steinernema ceratophorum partiti-like virus 1
  source 1..126: mol_type = other DNA
taaggttaacctactttgcctttggaccccaagcccccggatcttggtgatgaatttttactacaaattttatttcatataaattcctaaaataaaaaaaaataaaaaaacaaaaaaaaagaaaaa

SEQ ID NO: 2689 - DNA, 83 bp, String-of-pearls partitivirus
  source 1..83: mol_type = other DNA
gtttaagacgttatttaggcgtcttgtttcttaagtttttattgtaaaagaagaaaacaatctatgtaataaaattactagcc

SEQ ID NO: 2690 - DNA, 70 bp, Talaromyces marneffei partitivirus-1
  source 1..70: mol_type = other DNA
gagtgcacattttctttcttttagagtgtgtctgatcgcgtgttaacgcgagaaaactttaaaactctct

SEQ ID NO: 2691 - DNA, 129 bp, Terfezia claveryi partitivirus 1
  source 1..129: mol_type = other DNA
gttaccagatttactccttttcttttagttattaatgttattttaaccgataatgtccctaacttttacgtttctacaaaacaaaatcaacaaaaaaaaaaaaaaattccaaaaaaaaaaaaaaaaaaa

SEQ ID NO: 2692 - DNA, 58 bp, Thedrake partiti-like virus
  source 1..58: mol_type = other DNA
gatggaacgaaagccgtaaggtgagtagggaggtaaggtaggttgggatctaccagat

SEQ ID NO: 2693 - DNA, 59 bp, Thelebolus microsporus partitivirus 1
  source 1..59: mol_type = other DNA
ggacagtgtgttcccctcttcgtcttactagtaagacacaatcattgcgtatatcgctg

SEQ ID NO: 2694 - DNA, 21 bp, Tomato associated partiti-like virus 1
  source 1..21: mol_type = other DNA
gctgcgtgctgccacccggac

SEQ ID NO: 2695 - DNA, 97 bp, Trichoderma atroviride partitivirus 1
  source 1..97: mol_type = other DNA
gattttttctgcatgtgtatttattaattttcacgtgaaaacaaaaaaaaaaaattacaaaaaaaacacaaaaacaaaaaaaaatataaacatgacg

SEQ ID NO: 2696 - DNA, 17 bp, Trichoderma citrinoviride partitivirus 1
  source 1..17: mol_type = other DNA
tttaccttctttgatag

SEQ ID NO: 2697 - DNA, 52 bp, Trichoderma harzianum partitivirus 1
  source 1..52: mol_type = other DNA
tgttgcgtcgaatccatccaccagtaataaaaaaaaaaaaaaaaaaaaaaaa

SEQ ID NO: 2698 - DNA, 49 bp, Trichoderma harzianum partitivirus 2
  source 1..49: mol_type = other DNA
ttctgacgggtcgagaacttttgagacaaaaaggcagaaaaaaaaaaaa

SEQ ID NO: 2699 - DNA, 79 bp, Trichoderma harzianum partitivirus 3
  source 1..79: mol_type = other DNA
gagtgtacttctgcagaggcagagtttccagtatatctggggatgtgactcccgtttatcgggaagtgtaaccaaaaat

SEQ ID NO: 2700 - DNA, 160 bp, Turkana Partiti-like virus 1
  source 1..160: mol_type = other DNA
agaattggaaggtatatacctttgcctgcagtcttttttttaataataacatattaaacaatgcaaagaaaaaaatgaagaaaattttaaaattgtaattagaaataattactaccaaaaaaatttaaaaatataaaaataaaaaaaaactcaaaaaaag

SEQ ID NO: 2701 - DNA, 32 bp, Turkana Partiti-like virus 2
  source 1..32: mol_type = other DNA
gttgaaacaatgccaccgactttaaataattg

SEQ ID NO: 2702 - DNA, 91 bp, Ustilaginoidea virens partitivirus
  source 1..91: mol_type = other DNA
tccaggcgtgttcttctgctgttgcagattcttaaggtgtaaaccggatctgaacctcgtcgtgtatacgacgattgtgtgaagtaatccg

SEQ ID NO: 2703 - DNA, 80 bp, Ustilaginoidea virens partitivirus 2
  source 1..80: mol_type = other DNA
tacagtagtccgccaaaacctacgatacactcagtcatttacgctgatgtgttaggggtaatgtgcgtaaccacagaacc

SEQ ID NO: 2704 - DNA, 84 bp, Ustilaginoidea virens partitivirus 3
  source 1..84: mol_type = other DNA
gactggagcccacggaaatctatgatctggtagatactaacatctattagtgagaggtttcatagcattggctacgaacaccaa

SEQ ID NO: 2705 - DNA, 21 bp, Vaasa partiti-like virus
  source 1..21: mol_type = other DNA
agtgtgcgatatcgcccaaac

SEQ ID NO: 2706 - DNA, 47 bp, Vandelay partiti-like virus
  source 1..47: mol_type = other DNA
acgaattaactagagccggagtctaaatatagcggactaacaccaac

SEQ ID NO: 2707 - DNA, 36 bp, Vannostrand partiti-like virus
  source 1..36: mol_type = other DNA
tgtctcactcttagctggaaaaggcagacttccccc

SEQ ID NO: 2708 - DNA, 633 bp, Varnsen partiti-like virus
  source 1..633: mol_type = other DNA
aatacaataacaatacattttttatttctacaaatgtatgtatatatcaattttacatttcatatacatgcatatgtatatcattaggtcacttgaggagaagtttttgaatttgtttgattgtgaaaatacagaaacagaaatataaatagattcttacgacagattggagggaggagaattggagagtattgctgtttaattaattaatactgtggtagcaatcagtcctaagtataatggccagtatgattgatcccctgaattattatttgaaaaagagctaaacttgttgcagtttgtagcctgctggatactaggtcaacgaaactattcagagagtatccaagaacatttctccatttaaggatacacagaagtttgatttgtactattagaccagaccaggatcaaacaaccaaccaatgtaatcgtcgtagtccagtagatagagcgaccaaatcaaatatcaccaacaaaaaagaaatataaaaaatatatatcactggcgacttcatctcattagataggatctgaaagtaaaataaaattccgatgaaaagtttctcaaaaatctgttcttctaacttgacttgacactgtaggtccctacactaatgtgtaaaattaaca

SEQ ID NO: 2709 - DNA, 74 bp, Verticillium albo-atrum partitivirus-1
  source 1..74: mol_type = other DNA
acgtaacgactctcgtgaatgagtataaacttgtcccggttcaagtggtccttggatcagcaaaatactaaccg

SEQ ID NO: 2710 - DNA, 85 bp, Verticillium dahliae partitivirus 1
  source 1..85: mol_type = other DNA
gagtgaaaatcttctgcagatagcagagtcttgcgtgtatacgcggatgtgacggacagtgtatctgtccgtgtgactaaaatcc

SEQ ID NO: 2711 - DNA, 50 bp, Vespa velutina associated partiti-like virus 1
  source 1..50: mol_type = other DNA
attttgtggcgcccacatccctaaacataatgtggtgctggtaaggtacc

SEQ ID NO: 2712 - DNA, 113 bp, Vespa velutina associated partiti-like virus 2
  source 1..113: mol_type = other DNA
tcttcgagactcaggccgacgggtgtataacaatagtcagagaggcctacgaccacacccgtcgksywgagtctcgaagactactctcttggaatatctgaatctcctccgag

SEQ ID NO: 2713 - DNA, 49 bp, Vespa velutina associated partiti-like virus 3
  source 1..49: mol_type = other DNA
gatggaggactcttgggggcactttaaacatacccacccacttcgtgcc

SEQ ID NO: 2714 - DNA, 54 bp, Vespa velutina partiti-like virus 1
  source 1..54: mol_type = other DNA
tcgtaagaccacaacacattaatatcactcttatacactccacttcctttcacc

SEQ ID NO: 2715 - DNA, 43 bp, Vespa velutina partiti-like virus 2
  source 1..43: mol_type = other DNA
gcaatagaatgaaaaggagtgcataaattgcagactccctacc

SEQ ID NO: 2716 - DNA, 21 bp, Vespula vulgaris Partiti-like virus 1
  source 1..21: mol_type = other DNA
gtggcttggccttaaagcggg

SEQ ID NO: 2717 - DNA, 41 bp, Vespula vulgaris Partiti-like virus 2
  source 1..41: mol_type = other DNA
gagattaaggtttccaaaagccctcggaaaccccatataag

SEQ ID NO: 2718 - DNA, 86 bp, Vicia faba partitivirus 1
  source 1..86: mol_type = other DNA
acactttatcggtatccccgaaagtcttatgtttaagacgtcttcaggcgtcatttctacattaaggaataaaatatactccccct

SEQ ID NO: 2719 - DNA, 37 bp, Vitis cryptic virus
  source 1..37: mol_type = other DNA
agttttaaataagatgcttgagagggcacattaaccc

SEQ ID NO: 2720 - DNA, 46 bp, Whatley partiti-like virus
  source 1..46: mol_type = other DNA
gaaaagagctgaagagtgattgcactcctgttgtatgatggcgccg

SEQ ID NO: 2721 - DNA, 53 bp, White campion partitivirus
  source 1..53: mol_type = other DNA
aagccgatcgctttgtttgtattttttttaaaaaaaaaaaaaaaaaaaaaaaa

SEQ ID NO: 2722 - DNA, 29 bp, Xiaogan partiti-like virus 1
  source 1..29: mol_type = other DNA
accgccaaattttctttttccaaaaagac

SEQ ID NO: 2723 - DNA, 12 bp, Yarrowia partitivirus A
  source 1..12: mol_type = other DNA
cactaataatag

SEQ ID NO: 2724 - DNA, 1272 bp, synthetic construct
  source 1..1272: mol_type = other DNA
taaaataactggagaaattactaccaatttcaaattcccacgttataattaacccaacagatattctgttcccttatatagctccccactcaccacaacaacttgtctacttacataaataattgaaagctgactatgtgatcttattaaaattaggttaaatttcgaggttaaaaatagttttaatattgctatagtcttagaggtcttgtatatttatacttaccacacaagatggaccggagcagccctccaatatctagtgtaccctcgtgctcgctcaaacattaagtggtgttgtgcgaaaagaatctcacttcaaatgcgtaaaggcgaagagctgttcactggtgtcgtccctattctggtggaactggatggtgatgtcaacggtcataagttttccgtgcgtggcgagggtgaaggtgacgcaactaatggtaaactgacgctgaagttcatctgtactactggtaaactgccggtaccttggccgactctggtaacgacgctgacttatggtgttcagtgctttgctcgttatccggaccatatgaagcagcatgacttcttcaagtccgccatgccggaaggctatgtgcaggaacgcacgatttcctttaaggatgacggcacgtacaaaacgcgtgcggaagtgaaatttgaaggcgataccctggtaaaccgcattgagctgaaaggcattgactttaaagaagacggcaatatcctgggccataagctggaatacaattttaacagccacaatgtttacatcaccgccgataaacaaaaaaatggcattaaagcgaattttaaaattcgccacaacgtggaggatggcagcgtgcagctggctgatcactaccagcaaaacactccaatcggtgatggtcctgttctgctgccagacaatcactatctgagcacgcaaagcgttctgtctaaagatccgaacgagaaacgcgatcatatggttctgctggagttcgtaaccgcagcgggcatcacgcatggtatggatgaactgtacaaatacccatacgatgttccagattacgcttgagagtcatgcactgacagacatcagccgctgaccaccttttttctttttcctagtatctcggatttagaaagcagcaattttacaaaagcagtcccattcggactagctgctttttcttacgcatttgcgtttgcttttcccttttagtattccttcttttattactaaatgtataacttaaattaaaaagaaaaaaaaaaaaaaaa

SEQ ID NO: 2725 - DNA, 1699 bp, Silvergrass cryptic virus 1
  source 1..1699: mol_type = other DNA
gataatgattcattaggaatcatttatcgcacgttagttagaaaacgcgtaggaaaacttgtatgttgtgtataagctacctcgagttactaaccacgcatcctctcttttgcagactaaaagaagattttaatcaagcaacgaaacttaattaaatcgtacagtcgcaagctagaagatggatcacagctttcgtggaattcgacagggccttattgagctcaagaagatttccgagagaagatcaagagacgaattcagagtctatcaagatgaatatgctgcagaagctatccgtttgattgtacccatgaacattcgttttgaattgcaaggctgggccagaagttattatgacttgcagcaacatgttcaagctattgaagcttacaacttaccaaagctgcctgaacccacccacatcgcttggaatcaaactaagcagatgacacaggctatattccgccaattcgaccagatagattgtctatcttacaaagattttgacagtgtaaaatggatgtcctcatcctcagctggttacggttacgaaggtcacaaaggtgacgacgataactacaagaaggcgaagaagacagcagtgaccatagcagaaaagcttaatcacgacgtcaattacggtcctgaagcaattaaagagtctacacctgacatcgcgttcaccagaacgcaactaagtcaagtcaaggtgaagacgaaagtcagaaatgtctggggtgaagcgtttcattacgttttacttgaaggattgtttgctcaacctatcgtcgagtatttcatgaacattaactcgttctacttcatcggaaaagatccactactctccgtccctgcattaattgacgagatgctgcgtaataaagattacgtctacatgtttgactggtcagcgtttgacgctaccgttcaagaatgggagatccgattcgctttcgaatgtttggaatcaatgatccagtttccgtccacggtcgaattccaaatctggcgttttgtaattgaactgttcatatatcggaagattgctagtcctcacggggtattgtacttgaaaactcagggcataccgtctggcagttgctttaccaatatcattggaagcatcacgaactacgttcgtattcagtatatgtttaaccgcttaaccggttcgtttgccacagtctacactcatggcgacgacagcctagccgctgttaacagtgatcaatttgtgcacttcaacgcacttgaaaagatagcatcagagcatctttggaagcttaacgcttctaaatcaagtatgtcaatgaagcaagaaggtgtaaccttcctcagcagaacagtccgcgaaggtcagaaccgacgcgaagaacttgcctgcctgcgcatgctaatgtatccagagtatcctgttgaatcaggtgatctgtcagctctcagagctttcagtatcatgaatgactccggtttacactcctcctatttcttgaaaatctttcagctactcaaagagaaccatggaatagcggcgtccctacccaatcacttgaagatctgggacccaaaggaatacgaagcccgaaaagtttcttattccatgtatgtaatgtagtccttttattgtaatgaactttatttatataaaaggaccctcttgcataactctacgttcgtaggattatgcggagaccttatc

SEQ ID NO: 2726 - DNA, 1490 bp, Silvergrass cryptic virus 1
  source 1..1490: mol_type = other DNA
gataatgatttatcagaaatcattatcccggtttatccggtagaacgttagataggacgctacgttagatcatagagttcccacccaactgtctactgactgtaaactgtgcattttgtaggtgaatttatttgaagtcaacgaaagttaatttcatcgtaacaccgccaagatgacctctcccaagaaggacgataacccctccaagaaacgcaaatttgatgccgcttcgacttcagctccccctgcactcgatcctgcaaatgcccaaatcgtcgttgctggccctttaactgatgttgcccgcgaagaacgaatggaagaagctgctgctcctgtttccgaattggttcctgtccgatatgagagactcgctggtgaaaccaaacctggtttcgctatgtcaatgcaaaacgttggcgagctcggttatatgaaggctcctcttaaccaacttatggctaatagaacctatgaactggctccaacaattatcagacaacgcttaacagctgttctgacctctgtgttgactttgctgtttcgtgagcgtggcaatctttccatcgctgcatctgctgctactgccgctacttacgcaacactcactgctgatggttgcatgtctgccctctatggacgacttcgcaacatacacaaggctaccggcgtcaacccgacccgctatacctctcctccgatttacaacaagacttatgagctgccactccctttcgctttagcgattgaaggaattggtgttttcgtgctcgatgatgtgcaaaacaaacgtctcatcgttccaacttaccccgagaacacaagaaatgaaggccgttccgctgacacctggaatactacccagtacgtcactgccgttgcaaacatgaaggcccacggaataccgttcaagaagattgatcttcaccaacagtccggtaatccctggtggacttttaagagtgtgtataaccacacagcttttgatttgaagtgtatatttcctccaactatgtacactctcctggcgaacactattgctactatgttcctgagtcgcgctgaaggcgctgctgttcagatcctgactcacaaggacgacgacgtggattatccgcgccgagcaagagatatcgacccgcaagaagtcgcgaaggcattcttcgcattatgccacttcccgaagatgtaccacacaagtgtgactgttaccgcttgatgatgttgtaccctgctactgctcctgatgtatcccaagacatcttaagttgcattcgcttgtatcactacgaacacatttgaatttatggttgatgtgatgtaatatttatttattgccgtcccatcgtatattttgaatcattttataaatttaaataccaaactattactaaccctttccttttcaggttagggggtgtgatgtggtcgtggcatttctagagtgactacgtcacttttgacaataccacgggcgcaccacccttatc

SEQ ID NO: 2727 - DNA, 1508 bp, Silvergrass cryptic virus 1
  source 1..1508: mol_type = other DNA
gataatgattccttagaaatcattatcccggtttatccggtagaacgttagttaggaaacgacgctagactatagggtcacctcctctacctctactggtactaataaaaccgatcattctttggatgcagatttgattaacgaagtttaattacatcgttactccgtcgacctcaagacttgctaggaacgcaatggaagacgcaaacgctcctgctgctcccgaaagctcccttggtgctggctctttaaagacctccgcctccgtgccaggccctgcccgccgtcaagatgctgcttttgctgggatatcctcaaagataaacacccagactgaagttccaagagcgcctaaagccgtcagtgaatttgagcttcgagctcccactgaaccactggcactcgggaacaaacattatgaaacgatgcacttgcttgaaggccgttatggtatcttttatgcacgcgacaaagctgagaaccctctcacttggtttgaactcaacgccaacaactttcgaacctccgtcgcagcaactcttcgttcagctctttttcgccttatggtgaacaaaggctatgaggacgatgatgatatcgagcgccgccttaacagagtggtccctgttctgatccgtggtgtatgcctgatgacatacctcaagatccgcgcagttaatctggccatctccactgctggtgaccgttacatattgaagccgaaggtccccgaaccctttgaggttcctctccccttcgcaatcgcaatctcacagcttggggcttttgaaataaacagtctcgccgaaagaaagatagccattccaggcctttctgatgcagatgccactgctcgtctcctcgacggccgtttcactgcagctgaatatgctcacgctactgagttcgcgaaaagtttagggatacagttttcagctgtagacctagacgtgaagctaggatctgcctggtggatgttcagagccactcccgttgatgaagtgtttactcttatctgcccgctgccggaatccaactttactgagaccaattccttgatttaccttatgttctgtgtcaatcaagatggaagctttggtacccaactctttgcacttggagactacgccgcaaccgactacggttcaatgcttcgtaatccacacgatggtgccaacgtcaatgccttcttcgcctttagtgatgatccgctgactgcactcgcaaagcttggatgaacatttacgtctactatgtactcggacaatgttatcgataataatggtgctgtattgtaatgaactttaaattactttcagttgagacaatttgtatttcaatgtcactttgtttctttgtgcgctttaaaatgattctaatttacgatttgtttcgtaataccgtcgagggttgtttacgtcccctcttcggatctggtgatggtgtcattcatcccaatgtagcttctcagctcattaactttgatgaatgcgctcacacccatattc

SEQ ID NO: 2728 - DNA, 1699 bp, Silvergrass cryptic virus 1; identical to SEQ ID NO: 2725
  source 1..1699: mol_type = other DNA

SEQ ID NO: 2729 - protein, 478 aa, Silvergrass cryptic virus 1; identical to SEQ ID NO: 804

SEQ ID NO: 2730 - DNA, 1490 bp, Silvergrass cryptic virus 1; identical to SEQ ID NO: 2726
  source 1..1490: mol_type = other DNA

SEQ ID NO: 2731 - protein, 347 aa, Silvergrass cryptic virus 1
MTSPKKDDNPSKKRKFDAASTSAPPALDPANAQIVVAGPLTDVAREERMEEAAAPVSELVPVRYERLAGETKPGFAMSMQNVGELGYMKAPLNQLMANRTYELAPTIIRQRLTAVLTSVLTLLFRERGNLSIAASAATAATYATLTADGCMSALYGRLRNIHKATGVNPTRYTSPPIYNKTYELPLPFALAIEGIGVFVLDDVQNKRLIVPTYPENTRNEGRSADTWNTTQYVTAVANMKAHGIPFKKIDLHQQSGNPWWTFKSVYNHTAFDLKCIFPPTMYTLLANTIATMFLSRAEGAAVQILTHKDDDVDYPRRARDIDPQEVAKAFFALCHFPKMYHTSVTVT

SEQ ID NO: 2732 - DNA, 1508 bp, Silvergrass cryptic virus 1; identical to SEQ ID NO: 2727
  source 1..1508: mol_type = other DNA

SEQ ID NO: 2733 - protein, 347 aa, Silvergrass cryptic virus 1
MEDANAPAAPESSLGAGSLKTSASVPGPARRQDAAFAGISSKINTQTEVPRAPKAVSEFELRAPTEPLALGNKHYETMHLLEGRYGIFYARDKAENPLTWFELNANNFRTSVAATLRSALFRLMVNKGYEDDDDIERRLNRVVPVLIRGVCLMTYLKIRAVNLAISTAGDRYILKPKVPEPFEVPLPFAIAISQLGAFEINSLAERKIAIPGLSDADATARLLDGRFTAAEYAHATEFAKSLGIQFSAVDLDVKLGSAWWMFRATPVDEVFTLICPLPESNFTETNSLIYLMFCVNQDGSFGTQLFALGDYAATDYGSMLRNPHDGANVNAFFAFSDDPLTALAKLG

SEQ ID NO: 2734 - DNA, 3439 bp, Spinach latent virus
  source 1..3439: mol_type = other DNA
gtggtattgtgcattattattttaacgcacaacccggattaatcaggttttctgagtatatacccgttagtactcaatggatacaattgttcaaatgaaagtattgtgttacgagtcgatgatattattaatgataccttcagacgtaaacgcaccaaggccggaaactgccattggtaggttgatttccgatgccgctgtttcaggtgttttgcgacaatgcgatttcactgcagcggaagcctctcaatgttttgttccaattatcaccggaagatcagaatgcattgagacgcgattttctggaagagaaatacagtttcgcaatttttcgtattcctcacaatcattcgctgctgcgcatcgagtgtgtgaagcggattatatttatagtcgattccagacgagaaataccacgatcattgatattggaggaaatttttgcacccatagtaaaatgggtagagataatgttcattcatgttgcccgatattggacgttcgtgatggagctcggtatactgacaggttcatgtctgtggcgggggctttggaaacccagcctgaccgtgagctcagactgaactattgttccaataaatttgaagattgtgatgtttccgcaccatgggcgatggcgattcactcgatttcagatataccgatcacaagtgttgttaagcattgtttccgcagaggggtcaagaaattgatagcctctgtgatgatggatcccatgatgcttgttgcttctcaaggttttatgcccagattgaatgttcaatgggaaattgaacctgatgaggagaacaaaggttcccggcgaatttcttttcatttcgtcgatgctcctggattgtcatatactcataactatgacgtgcttatgcagtacatgacttgtaatcaagtcataatcagtgggaaagccgcgtatcgagttgagcgcgttgcagatctgtctggtgtttttattgttgagattaaccctggcggcaactgctggaatgaaagactggatctagttcccatgcgagatgtttcatgcgcgtggatgacttcgttaaaacgtaagaccttagtgcgggttgccatcccgcaatatattcattcatgggaagttaagtatgtgattgccgacactgattttgttagaagagttgctgaagtgtcgttccgtcagtataaaccagaaacaccattacaggatttggtgaaatctgttgcgacgatgatttcctctgcttctaaccattgcattatcaatggtgtcaccatgcaaactggtacaccgttggccattgaggactatgtcccaatggcggtgacttttgttgccttcgctaaatcaagatatgattcgataaaggaaggcatgaaaatggttaggcagagaggtactaatatcgcggatcctaatgatcattatgattatgagaaagatggatcggatgttaagagtttttcaaatcacataattcccatgaagaataccatcaagtctctgtttttccccatgaaagtgaagatgaatgataattctatgctcatttatagtcaaggaatcttgtcaactgttgttgatgagataaaaacactttttggatgggatgtttgggacactgacgatgcggtaatacagtctctgccctctttttataagatggaggatgtttttcaagttacgtctgaccactattgtttatcacatacattatctgtggattggtggttggagggactgtatgattcttaccatgacatgcgtgttgcgcataaaaagaaacttgatgaagaagaatctcggaagaccaaggtcgagaatgccttattgaaaattgctgaggttttggagaaacctgatgttagcgatggtcttaaagctctttcagaattgcccataatatcatcattattggagaagaagagcgaagaaatcgttacaaaacctcaatgcagggatactgaaaaaccccatattaatccctatgctgatgcaatcaaagaggcgcaggcctattacgaagagcttgaggtcgtaaatactcgcaatttgagaggtgttggtgattacctcttttggcgaaagaagtcgaactatgccagcgtttggggcgctgatgaatcgagagtggttcttgaacctatggcaaggaagttttactctcgagatagaaatgtttccatacccgagtatgagcgaggtatgacggttgatggtttcgtctccattaaatgggtggacggaaacattactgaggacacgtggaagtgtctttccaaatacgcagttgttttgctcgactcttcttgcgtgtttgatgccggttcacgtattatgccaggtctgaaaaaggcattggtaatggatgcaaatttcaaaatcgtgatcgaggatggtgtggcaggatgtgggaaaacaacatctctcctcaagcaagctaagccggattcggatttgttgttagctgccaaccgtgagactgcaaatgacgcaaaagccagcggcgttattcctaaagcgcttgaataccgagtgagaactgtggattcttacttgatgttgagaacgtggttcacagccgagagattgctcgttgatgaatgtttcttggtccatgctggcttggtctatgcagctgccaccttggcacgagtgaaggaagtaatagcttttggtgatacaaagcagattccattcgtgtctcgtataccaactgtcaaactcagacacgcgtctgttgttgggacgttgaagccaagaacaattacctacagatgccctagggacgtgacggcagtccttagtgagaaattttatggtactaaggttaagacgtttaatcttgttaaacagtctttggaattgaaaaacatagattctagtaccgaaatacctgtagaaaaggatacgctatatatagcgcatacccaagctgataaacatgctttgatgcgtttacctgggatgaatggtatagaagtgttaactactcatgaagcccaagggaaaacaagagaccatgtgatacttgtgcgtttaagtaaaactaccaatttattatattccgggaaaatgcccgatgctggtggttcgcacaatcttgttggtctgtcccggcataagaaatctttgagatattttagtgtctttgccgatgatccagacgatcaaattgcgactggaattcgctggtccaaaacattggatgagcaagagttagcagcttatagagctgctggttagtgttttatttataaaacctggttaagggtcctccgggatgtgctcagcacctagcctaagccaagtccatatgcccacctatgctgctccgggtggatgcttatacatgctatggatgcctacatttgaaataatgtagatgcctaatactctctctcagggagagagtttagatgcctccaaaggagatgc

SEQ ID NO: 2735 - DNA, 2939 bp, Spinach latent virus
  source 1..2939: mol_type = other DNA
gtattgtgcagtattattttacgcacgacccggattaatcatttttgtgagaatatacccgatagctctcaatggattcttaccacttcttatctcagttgtgtgacttgaatgttctgactcatgcgctttatgttaatcaagtgtttgagattgtggatcagtccacaactagttatatgcagatgtggctttattcccgtgttattgtcccagttttgaaatatcatctcagtggagatattatattggataaattgcacgatgtgttccttggaacctttcgttcaatgatggtgccgatgattatgttgaaccgactttcattcgtcgtgaagatgacgacgatgaaccaccaccggaaagcgtatttgccgcttgaagaaagggaaaaaattcatgctgcgacgtttcttggtcatgatcattgggcaagcgttacttcgggatcatctttttatgatgatctcgaaattctcgctgatgagaccgtgaacgatgatttgcattttgataaagaatcttccatgccagatgagtatcagatcatgtggaatgatggtacaattgattccgtttggtctagtcagtttgaatgcgaagaaccaccgaaaccgaaatttataccacgcccttctgataaggtgtgtgatccagtggttattcaagatgccgtgaacgatatattcccatttcatcatgagatggatgatcgatatttccagacgttagtggagacacaggatatttcccttgaggtttcgaagtgttggatagatgcctccaatttcagagattttgttaagggtccaaattcttatgttgagcctgtgtttcaaaccggtgccactagtaagagagtgcatactcaacgtgaggctcttttagctgtgaagaaaaggaatatgaatataccggaattgcaatccactttcgatcttgatgcggaagtcaacacgtgtttcaaacggtttctcacacacgttgttgatttgccacgattaaaaaggttgcaacctatgactggtgttgaggtggaatacttcaatcaatacttgcttgggaagaatccacctgtgaaggaatatcaaggtcccttgacattgactgcacttgataaatatatgcatatggtcaagacgattgtgaaaccagtcgaggacaattcgttgaagcatgagcgacctttgtgtgccactattacctatcataagaagggtatagtgatgcaggcctcacctcggtttttgagtgctatgtcaagattggtttatgtcttgaaatcaaaaatccatattcccagtggtaagtggcatcaacttttcacgctggatgctggaaaatccgatgccgtaaaatggtttaaagaggtggatttttcaaagtttgacaagtctcagggcgagttacatcacaaagtgcaggagaagatatttaatgctttaaagttacctcccggatttgttgagatgtggttttccgcccatgagcgatcacacattgtggacagagaagcagggattggattttccgttgattatcaacggagaacaggagatgccaatacgtatttgggtaacactttggttactttgatttgtttggctagagtgtatgatttatgcaatcccaatattacctttgtcatcgcttcgggtgatgattctttaattggaagcgtcgaagaattaccgcgcggaccaggagaatttatttacaaccctgttaattttgaagcgaaattccctcataatcaaccatttatatggctcaaagttttagtaagtgttgatcttgaggatggtggaagagaagtgatcgctgttccaaaccctgcgaagttgttaattggtatgggaagacgagactgtcaataccaagctcttgatgatttgtatcaatcatggcttgatgtgatatattattttagagatgctcgcgtgtgtgaaaaagttgctgatttgtgcgcatatagacagacgcgaagaagctctatgtatttattaagcgctctgttgagcttgcctagttgttttgctaataagaagaaatttaagtggctctgttatcgtttaagagagcaagggtgtctgaagaaggatatttatcctgtagcaaaacctataagtgcccataatataaggaaagaagattcaaatggatgcgatgttaatcaaggaacagatgattcgttctcacggaaaaagaatcgtggatgctgggagtatgtcccaaagatgttgcagactgatgtgtctgttcctgttactgataaatctttccacagtaacagaggctcgtcggtttccccaaccgattgcggtgatggagggtgctccagatccgccagctcgattggtagtaaaaataccaaacctcgccatagatttcgagctgcaggagttcaccaacccagcggtcgtgatccagaccgtataccgccgaatcatcgacgaagtgcctaaaggttggtatggtttaaagtcctggtcttcctccaattatggagacgttgtggccggactaaaaagggctgcacgagttaaagtgcatttttctataccgggttcagattgggcttataccttaaatctgtccgaagtggtatctgggttagcactccccaaattaccaattcccgagaaatatctcaggatgccgattgctatcacaatcgatgataccgtcaataaaattggcgatggttttgatgatgtaccatctccatggtacttgtatcaatgatgtgttcctttcatggaacctagtgaggggccctccggggtgtgctcagcacctagcctaagctaagtccatatgcccacctacgctgctccgggtggatgcttatacatgctatggatgcctacatttgaaataatgtagatgcctaatactctctctcagggagagagtttagatgcctccaaaggagatgc

SEQ ID NO: 2736 - DNA, 2735 bp, Olive latent virus 2 RNA 2
  source 1..2735: mol_type = other DNA
gatatttcgcactcctagtgaatcttcctagtatatccgttgaaaaaacgagagtgcaacaacaaaaactacagagttctttttttttaaaaaaaaaaaaaaatcaaagagacatggccggagtactttatgatgaggagtacgttccccaggaaccggattacttgtattgcccgtacgagtgggagggtgaagatcctacccaatgcgatgcaaatgttccgtccgtcagctaccttgtggaggctgtaaaaaaatcctttactgagggtaaccacgatatgctgatttcttgcgagtcgtaccacgccgagtgttgcgagggtcccttgatgaacaagggtttgaccctctcgacttactttatgagttatccgggcatttcattacctgcgttcggcggtggtgtgattcatgtcacttcagctcgcgtctgcatgcaagctttttatgccgtgaccccaggaaggtgtagttgttcgtgtggtacgcaattcatctatcgtgccaaaggtggaactggtctaacatttgacgccacgaacactatttctagtgcctttaagttcgaagacgggaaagtgaaatggttaacagaagacctaggcttggcattattggctggttgtttcttgaaatacgtgccaatacctcatgagattgaaattaagatcgaaagaaaggtcgagcccgtgtctgctctggatttttgggaaccagaaggattgatttctgacgtacatttcgtacatccgcaagagagagccttggctcctgagcctccaatggatgtagagatggtgagattagtccgtacggaattgtttgaacactttaatcccacccttcttctgaacgctcggtcggatttttccggtgagaaactgaaagaggttgagttgccacgagctcaatcggaacccttagtccctagggtctgtctcccgcgaggtgatgacgctttaattgatcagtttttcatagacaaggcacccgagcattttaatcgtgaacctgccacagatcaatggcaggtggaatctgatgactttactgtggatttccccacccaagtgcgattacgcgaacgggacgaagattggttcagaaggaaacccgatttcgctgtgtcgtccattcgtacaggtctcgagatgcctcgaattgctacaaagaaggaaatgttaatggcattctcgaagagaaacgttggagctcctcagatggtagaggtacctcaggagatccacgtgaagaggttggctgataggttcttccggacattcttgaaagaaggcggctgggataagggggatggtcattattgggatgattttttccatagaaagggtcgaaaggtcttttcattggagaattgttacgatgaccccttgtcctcatacttagttatgctgaagtccgctgggaaattctctctagatctgaactttccggttcgatcggtaccccaaaccattacttatcatgagaagtgggttaccgaggttttttcccccatgtttctgcaggtgatggcaagatttttctctcgtctgcaagattgggttgttgttccggctggtccgatggctgacttctcccgtgtttggcctagctttgaggggaagtgtttaacagaaattgatctgagtaaatttgataaatctcaaggtaagctgttgcatgatgtgcagagggagattttcctccgtctgggtttcccacccatttggtgtgattggtggtttaaattccacgagtcttcctatttaaatgataagaaccttggtatagctttctcagtagattaccaacgtagaacaggcaatactgccacttactttgggaacacgttggtaacaatgattatgatggccgaagtgtatgaacttgattctctccctttctgtggtttgttttcgggtgatgacaacttgatcgtgactgatcgacctcttgaaggtcgagtttcgttattcccgaacatgttcaacatggaggccaaggtgatgcgtccgggtcagaattacatgtgtagcaaatacctttgcactgtagacggtcgcgtaacccctgtccctgatccttttaagttgctgaagaaagctggtgcctcgtgtcctttggagcaccttgatgacttttacgaatcgtttctggattataccaaatacctggtgagggatgaagttagaacattaatacccaggttgatggcccacaggtatcaagtctcgatggatgaagctggagttgctcttgatcagattatgagctggcgaaagtcaaagactcaattctttaagcatttccagtacaggaaaccaatcaaggactcgctcgaggctgtgaaatccgacttcctttctgctttcggaaaagtagatgatcgaataagagtttggcgcgggcgtcgaaccaatcataagaaggaggtcgatgctttaaaggtcccattggtgagttttagggagtgatggtggctcgcctagagcggtgtgctggtttctacctaaggaaccaggagagtggagtgacttggtcatgacaagtcgagtagtactttaactacgagtcgtcgttgagacgccggtccccttccaaggggatcgagagggttttcccggtactttacccgggattcgaattgagctgtctttgacagagctcaaactcctcgctagatactctaacgagtgtcttgaggactctcctatggagagtcagtaaagacc

SEQ ID NO: 2737 - DNA, 7531 bp, Citrus yellow vein clearing virus isolate CQ
  source 1..7531: mol_type = other DNA
gaaaagcaaacattatcatacacaccccaaaaattgtgatcatcgtctctgcatcaacagctcagctaagaaccagagaaatggccactattaggggtgccatcgaacgcattacagacaccaccgtacgcactacacttcaagaggaggcatgccgccaaatacgcgctgaacttaaaaacgtcgaacacatcaaccgttacgctatacagcctgacgccgccgacgcactcgaacacctaggcattggttctaaccccttctctgtggcactgcacacacacggtgcctgcaaagcgattgagaaccaattactctatgtagttggtaccttactcccaaaagaacgtgtcaccatgctcttccttaagaaaagcaagctcaacatcatgaaacgctgccctaaattccaagacatcttcctgaaccaacatattgaaccacgcgacgtttctaggtactgcgactttaacgtccaatccacctccaccagcatacccacacgaacggcttacatcagtgacacactccactttatggaccgtagagacctagtccgactattcctaaacagcccaaatctagagactctctacgccaccattgttctcccagtcgaggctgcttacaaacaaccgagccgctacccagagatataccagattaactatgacttcgacggtttccagtacatacctggaggccatgggggcggcgcctaccaccacgagttcgaacagctgcaatggttagacactggccatatccactggcgtgggcccgactgtaaagagattcgcatgacaattaccgcccaaatgctcgaaagcttaggtgcgaatcatcttttctgcttcaaacgtgggaaactactcaccccacgtgtacgcactttcggccgagatacccaagtgctcttgcccaaaatcttccgcccggccgacaaaaactttaacagggcaataccactaaccctagctaacaaactactcctgtacgctaaatccattaacacagtgaccttccgcgacgtcgttgccaagacacgccaacttatgaaggacaaggagcttgaaacatacaccggcaacgacctgttgcatatggccaactatttcttcgctgttggagcactgtcaggagttaactcctatgaccaattgcttggcctatccgcctgggaagcctgcaccgtccgtatcaagaacaccataacaaatctctgggaaaagattgccggaaagaaagagttcggcaagctattggaggcccttgagtgggaaacattcacatactcacgtcaagtgaccgaattcaccgttacgggactgcccgccctgctccccctcccagacatctcagaccaagaagagattttcgcccagcaggacgagttagacaaaatcactgccggcgctaccaagatacggactattgacattatgcggggacaagctaaccgcgctaacccaaaaactccgatcaactcaacaccggcccagggaccccaactgcccgatacccccgacccaatcgaccaagctgcctccaaagacctcgtcaccaagcttcagaaaaacaaacgcatttacatccaagacgacgggccggaataccttatgggacacatggctgaagtccctgcctggtatcttgaacaagatgataccaccactagactcaaaaaccgctgcgcttggttcttcggcccacccacctacagatatgggcacaacgacattgagtacaccaccatagaatactacccttgggtcgagcgtattggagccattttcggcaagtacaacacctgtcttgctcaaacttacgacgccggagcccgtattggataccacgctgacgacgaagactgctacgaccccgacgtcaccgtggtcaccatcaacctcactgggaacgccaccttcctgctcaagaccccaaccggcactaggacctggaaacttaaacctggtgacttcattatcatgaaacccggtgcccaaaggtgcacaaaacatgccattagagattgcacaactaaccgcacatccttaaccttcagatggcaggcccgcacttgccccactaacctcagaaagatcactaacctacccaaagccaccaaccaaccccaaaccactgaatggcgtcctgtaactaaaccacgccctagcaccaccgcttccagcgacacccagaccccacttgtcatagaccaggaacgagggtataccaccacctccgacgtgacaccaacgattaggctgcccgccgaaaatggtaataacaccggtgctggaccctcctccgcattaaccctcgccgacctgaatgataaccaagcgccgaccactaacaaaggaaaagagaaacttgaggaaatggtcgaaactggcccaactatcatggaacgcttcctcaacaccgttcaggaaccaacacaagatttatgggactccgcctctgaatccgccgcgagctacctcgctgaaggcctcggcatctctgccatccaagcactcccttgggcacctcacttggaactcatcaatgcattaggcttccagggcactgaaaggcaatacggcccagacaactgtctcatatggcctatcacgcattacagagaattgcccagaagcaacaatgtcgaagcccctccggaagtgcttgagctgctcgactgcatcaatagataccccactgacgtcccaatgctcaaaactcgagccgccgccttcggttcagacgtcaagaatctacgcataggggcacttgttaagaaccaggacaaacagtggcgcgcatcactcgcactactttgtgaggaaaatgaacacctcctccctaccactgtaatacacggcgctggtggctccgggaaatcccacttactccaacagtgggtggcgtctactgagcgcggaaatgtagtcaccatcttgcccactatcgaactccttcgagactggcaaaacaaatgtccacatgcaccgaaagagactttcaaaaccttcgagaaagcgctcatccagaacagcgcccccgtggttatcatggacgactactctaaacttcccccagggtatattgaagcctacgtcagcctcaagggccagtgcaaacttctcatactcactggagatcctagacagagccactaccatgaggagaaccctgaggccttaatctctactcttgaccccgccacggactactttggcaaattttgcgcatacaacatcaacgccactcatagaaatgccaaaaccttcgccaatgcgcttggggtgtactctgaaaaagaaatccccaccaccatcacctgctcatcctaccagaaaagcggttggccaacacttgtcccatccatccttaaaagaactgcgctcaacgacatggggcagcgctcactaacctacgcaggctgtcagggactcaccaccccaaaagtgcagatagttcttgacaacgccacaccactatgctctgacaaggtcatgtacaccgcactatctagagcggtggaccaaattcacttcttcaacactggcccaaatcacactgattactgggaaaagatgaacgccacacctttcctcaaaactttcatcgaccacacacgtgaggagaccttcgctgagcaccaacctgccgaacccacagtgcgtgagtacgcaccagcaacgcatttcccaccggctaacgagaacctagcactagagccgtgggtcgaaccgctgactgataaacactcgcgggaactcttccactctgccttaggccacagcaactgcgtccagactgaaaacaccgtagtccaactttttccccaccaacaggccaaagacgaaacgctcttctggaaaacaatagatgccagaatcaagataaccaccccagaagagaacatcagggcttgcagcatagccactgacattggcgacatcttgttcctaaattacaaagaagccatgggtttaccacaagaccccatacccttcgaacaggcactctgggactcttgtcaagccgaggtgcaactaacctacctcagcaagcctctggctgcactcgcaaatgccgcccaaagacaagaccccgactttgactccaacaaaatccaactcttcctgaaatcacaatgggtcaagaaagtcgagaagatgggctgccttaggatcaaacccggccaaactattgcttccttcatgcaacagactgtcatgctatacggaactatggctcggtacatgcgccgcatccgcacctcactttgcccacccgaaattatgatcaactgcgagaccaacccaaaccaaatcggaacatgggtgcgtgagtattggaacttcaacacccagagccatgagaatgactttgaagcgttcgaccaatcccaagacgccaacatgttacaattcgagctcattaaggccaaataccactcaatccccgaggagatcatcgccgggtatcgacacctgaaatgcaacgcccacatcttccttgggactatatcgatcatgaggttgtctggtgaagggccgacctttgacgccaacacagagtgctccattgcatacaaccacacaaggtactttgtgccgaaaggcaccgcccagctctacgccggagacgactctgcatgcgcgtcgcccctctctgaaaaacccagcttccaacatatctcaccagagctcagcctcaagtctaaggccaagattagaacccaacagaaaggagactttgcgaccttctgtggctggctcatcactccaaaaggcctgatcaaaaaccccacccagctttacgcctcctggttattggctaagcacaacaaagatctcgcggacgtggccagaaactatgccttggacttacgcattgcctatcaacttaaagacgagctctatgagttattatcacctgaagaacttgaccaccaccaactgctcgtccgagagatgatcaagcacaaaatgggccatctcctcaacctccctgaggggtttaaaacaaactaactcgaaatggacttacctgagctcctgctatccaaaaacttcattcgcacccggttacccctcgccaaacccattgtcatacacgctgttgccggcgccggcaagacacaacttcttgaagaattcgcgcggtcctcaccctcaaccaaaatctactcacctgtgaaacatcactccaactcactgctgctctcgcccttccacaaagctctctctgaagcttccattgtcgacgagtaccctctaagccagatacacgagaacgtcgagtacatctttgctgaccccatccaataccttggtaatccaaaccttagaaaaccccactacatctgcgcgtcttcccatcgatttggccattccaccgccgctctcctaacaaaacttggcattgaaacttacgcacataaagaagataccgtccgggtagacaatatcttccaggctgaaccagacggccaaatcatcgcctgcgaccgacccactcaagagctggctgccaaacacacactagactacctgaggccctgcgaaagcataggactaactttcccacgaaccacgatcctgatctctcacgaacttactgcagacaccctcaccaaagagatttacatcggtttgacccgccactctaaccaccttctcatactcactccggatgcctctacaacctcctcctgaccacacttgggctttccgactactagctcttggcgccgccttagcactgctcactttcacgctcaaccgagacacaagtcgtcacgtcggagatccttctcactcacttccttttggagggtactacagagacggcagcaaagtagtccattataactccccgagagccacaaaacctagcaccccttccttcctgtacctggccccaatcttactgatcctactaattcatgcagtcaatagatttactaatcctcgccattcttgttcttgcactcattgccagcctattccccgcacctgaaccttgcacaattgtagtctctggcgcctcagcctccgtaactaactgcccaaaccccgaacaacttgcagagctagtcagagcgcttaaaccggctaaaccggtttaaaacttaacacaaactcgaactcatgagcttcgactacactcaccctctctaccgcagctatccatttccacactactgcgagttcgaccggcaccaactctgcgaccatcatccagtactcaaacctccaactcacaaacccagcgccccgaactctctcatgtctaccaacgacaacaagggcaaagaaccacttcacccgacaccttcgggccctaacgacacgaccccgaaacctatccccgtacccactccctcagttacgcccacagctgcaggtaaggaaaaccaagaacccatcgaaaagcgtatcacacacgctttccacgctgaagcaaaaacccacaacaatggggtctctccacctgcctttaacccgaacaacatgaatgctgtgccgctgaacctgctcaacctcaacctaagatactcaccggtcactaactccatagctaaccctaaacagactgaggctatcgggaaagcttgggtccgcatcttgaacatcgatcctgccaacgtgttcttatacgccatcgacctcgccagagcttgcgccgacgcgggctcttcccctgaagctgatattattggagcgaacgaagatctcaaccccgttgttgaacgaaacgcattggccctagtggttagggatttctgcccgctgcgcgctttttgcgcttactactctcgggtggtatggaacctcatgatcaaggcggaccagcctccggccaactggatgaaatccggggtagacgagaacgcgaaattcgcggcattcgacttcttccatggtatcctctcgcccgcttccctgtatgtgcccctagagagacaccctacttccgcggagaggatcgcaaatcaggccatgttcgctgtgaaaattgccaacgctccaggaaatggcacggacctcacgatggaccacgttgccttcaccaaaggaaggactacccagcactccggcctccgcccgacccctttcaacatctaaccacctttgaaccaatactcctagcatgcctacaagcccttaaaccacttccccccgaaatccaaatagctatcatttcgtgtgtgtgtgacttctttaatttcttacgctgtgccagtagcaagtaccagggcaccagccgctcagctgttaaacgtcgagcggcccgcctgaactactgctacaagtgtgggcaccccttatatctaaataaacctcacccctgccgaccaggtcaattgtgctctgcatctatctccgagcgcctctgtttgctccacacaggaccgattaggtttctaaccgaaaatcctgttagtgccagagcagctcacttcctagcgcacgagctccttgaccccagatgaaacataaatattcaggctttcagtttccattttctg

SEQ ID NO: 2738 - DNA, 7890 bp, Potato latent virus, complete genome
  source 1..7890: mol_type = other DNA
tcggataaaccaaaccaacaatatttacacatactcaagttaaacatacactgttcaatcttgcgtacgttattatggctttgacttacagaagtccattggaagatattgttggtgcatttgaaccaagtgttcaaacagctattgcgaacacagctgctaaccactacaagcagcttgaggaagagaagggaatcttatttaattatgcattgccacctgaggccaaacagaggttaataggcgctggcatatatttaagtcccttttccgctgttccacattcgcatcctgtgtgtaaaattttagaaaatcatctgttgtatgtagagcttcctagtagactagataattcttttatgtttgtaggtattaaaaactttaagttggatctgctcaagcgcagacatgcaaatctaagcatgatccaaactatcaatagatatgtttgtagtttagataaaataaggtacggttcaaatttcgtagttagatctagcgctagttatccagagctttgcagacgcaaaggtgagcttgacggagcagtgttgagggaattggtgcctgagttgatgattaaaagcgctaagaatctattcttgcacgatgagcttcattattggacccatcgggatctgattaccttcttggaggtactgaagccagacaaactgttgggcaccttagtttacccacctgaattgctaaagggtgcgaagaaaagtttgaactcttggtgctacacatatagagtggacaaagacaaattgtttttttatccagatggcgtccattctgaaggctacgagcaaccattgagtggcggttacctcctcgaaacaagtaggattaccacacgtgatggtgaagtttattgcgtcgatgttgtgtgcagtaaattcgcgcatcatttgattgcaataacccgtggtgatctgattgtacccacacaacgcagttttgctccctttgaggccataactagtaaaggtttgaataacttggtgaggggcaaggtggaatgtttccccgtatgcgcaagtgtagtgtctaaattgtataggtatttgcgcacactcaaaaaacccgatgagcaatcagcaatggccaaattgagccaacttcaggcaaatcccactggggaagagatacatttcatccagggctttgccaaattggtgataaatacaaacaaaatcgacagtttaatcaactgcgatagtattaaggtgttcatgggcaaattgtttggtccgttgcccaattggcttaccaagagattgaggagcgtgcaagaggtgtctctcgatgaatttgtccattactttgaaccatatgtcgtcaacgtgcccactaagcatgtgaactatggttttgagttcaattacgtaatggaagatttcaggtacgagcagggtgagaatgatctagtggatatgctagacaattttgatggctccacaaagatgagcacaagcctttgcatgatgaccccatacgtcggcttagcaccattgaccacgcgacgcaaattcctatgccatatcgaggagaattccatattcagagtggtgtctaggaacatcttttgtagctacacaaatagttacaaagtggccgtgagcactgagggggtggttcggatacttgagatttatagcaaagtgtctgtggatctactgggagcgtatttgggaaaattgctcaagaaaacagagttcatagagagagtgcgatcaagggttaaggcaattgccataaagcacctcaagtacacttggcaacaggttggtctagcttggttcaccagtggaaggcgtggctacacaaaatacattgattgcagcccatacacgatgaataccttcaaagagcttaaagagagatggggtgtgattgtgcgtgaattgtctaaacagcaggacaacgctgaagctgcgaaaaacatacctgagcaggaaattcaaacgaccagcaaaccaagttgtgtggagaagcgaaattacttctcgaacactttgatgactagctttgctgcgtcaggagtgaaaggcaaggaacaggtgagctccgaaattgccaagggtaggggtgaaaggagcgaattgagggcaactaaattgatgggctcatgcagcaccctcggcaaagtggctcacatagcatcaagaaaaggctccatgggggtattggaatgtgtagcgagggtcatcaaattggatttccaaaccgccttgaagttccttagagtcaagggtgtgtggatgcaggagtatgagagcataggcgagttggaggaggagcagatacagagtcctgcatatgatttttgtgctgcgatcgcaatgaccttcaatgttgaaattgaattgacgttcccaggctcagagcttgtttaccacttcgctgcaagttcaactgtgagttgtatccgcttgagcatttgggaaggcgtagtcacactgatgagggctgaaaatgattgcgttatcactgcatgtgcacaagctttagctagggagcctgaggatgtagtgaaggtgctcaaagatagattggaggagagcatactggaagagatttggaacggcgaaggggtgcctttcgagagaatgtatctcttctttgaagctctggatattcaagcacattgcaatcgcgatggtgcacagctagtgttgaatggcgggggcaagctggcgcgatgtttcgtgattaaagaagatcacatcgagttcgcaggtgagaaaaaggtcagtagagtacttgagctccaggatgctagaacaagtagtaaagcagacccagaattggtcaaggagtttcagaaagccgggactgtggtagaatatgtagcagtgcaatccagagcgcaagtcctggcgaagagtctagtggatgcaaccactggggtgtgcagctcaaccatattcaatgactgtgagagcttggaacgttcctttagattcaccgaaagcgaactagcgcgaaatgtttgttgtgttatcggtacgtttggggctgggaagagtaccctgttcaaggatatgatgaggcagtgcctagggaaaggtgttcactacgcatcacctaggaaggtgttggcgaatgagctcaaagctagtttgggtttggcaaaagggaagcggaatcgaaaagtagggacagagaattggaatgtgcacaccttcgaaagtttcctaaagaaggcgaaaaatgttgcagagggtgagttggtgatcattgatgagatccagttgtacccgcctggctacctggatcttctactttacctcatacctgagttcactagcgtcttcgcggtcggtgatccatgccaaagtgattatgacaacgagaaggataggcatgtcttcttaggggttgagacagatgtctgtaggcttctgagcggccgtgagtacgaatttaatgtactttcccgcagattccacaacttaggctttgaaagcagattgccctgcagattcaaattcccggctggagcagtcaaggaagagtatttgttcgttaattcaatgactgaggctaatgagttggacagcgcctacaaaagtgtgtaccttgtgtcatcccacttggagaagaaaatagtggagtaccagagtgacgttaaaacgccgaatgtgctgacgtttggtgagtcgactggttgcaccttcaagtatggttgcattctcatcacgcaagtgagtagcgcatgtagtgagcgcaggtggatcactgctctatcgagattttctcacaatctctgtttcatcaatgcaactggtgtgcccatagaaaatgtggcgaagagttacaaagacagaagtttgggaaaattcctgtgtggaactgctgttgagggtgatataaaatcaatggcttatgggaccccaatcttcaaagagcagttcatcgccggcgttgggcgcgatgaaggtgtcaaggaggataaagtcaccggtgatccttggttgaaaaccatgttggatttgatgcagctcccagatgttgaggaagcagagatgatgcaggaagagatgcaagaagagtggttcaaaacccatttgccacaagaggaaatagaaggggtcagatgccgctggattcacaaaatgctagctaaagaagcgagggaatgtagaatgggatcgatcgtttcagaccaattcccagatgatcatagcaagcaagaggggaagcaaatcactaatgcagctgagcgttttgaagctatatacccaagacatcgggcaaacgacacagtcacattcattatggctgtgaagaaaaggctgagattttccaggccttctgttgagaaagcgaagctcacgcaggctgaatgttatggaacttacctgctcaaaaacttcttggatgtgatcaagctcaagcccgcacatgatgaggcaatgatgatcagagcgaaggaagattttgagcagaagaaggtgagtaagagtgctgcaaccatagagaatcacagtgggaggtcatgcagagattggtgcatagatatagggcagatcttttcgaaaagtcagatatgcaccaaatgggacaacagaatgcgggtagctaaagcagcacaaacgattgtttgctttcaacatgccgtcttgtgccgctttgctccctacatgaggtacattgaaatgaagctgaaagaagtgctgccggctcggttttacattcatagtggcaaaggtttagatgagctcaactcttgggttaaagaaggtaggtttgagggagtgtgcactgagtccgattatgaggcttttgacgcttcgcaggaccagtacatcgtcgcttttgagttggcactgatgaggtaccttaggcttccaaatgacctgattgaggattacaagtacataaagactcacttgggttccaagctggggaattttgcaatcatgcgcttctctggtgaggccagcacttttctattcaacacaatggcaaacatgctcttcaccttcatgcggtatgagcttcatggcgatgagtacatttgctttgctggtgatgacatgtgttcatcaaagagattgcgaatcaagaaaacacatgaaagctttcttggaaagctgaagttgaaggctaaggtgcaacacactgagaagcccacattttgtggctggaatttatgtgctgatggaatatacaagaagccacagctggtctttgagagaatgtgcattgccaaagagctcaacaacctgcacaactgcatcgataattacgcaatcgaagtggctttcgcttacaaacttggggagctggctgttaacaggatggatgaagaggaattgggggccttttacaattgcgttaggctcataacaaaattcaggcatctgctcaaatccaatgtagtggaggtctttaagcgtaaatagttgttactttagcttaggttagctactatagatttgatatatggatgtgcttgtgaataaagctttagagtttggtttcaaaagattgagttccgtgctgaagagtccgattgtgtttcatagtgtgccgggtgccgggaaaacgaccttgataagagcgctgcttaactcagacagcagattcgagggttggacgctggccgagggagacaagcctaaccttgaaggagtggtaatcaggaaatacgttggtggagaagttggtccctttgctctattggacgaatattgcgtggaaccggaaattgccggtaaactttacgctgtattcggagatccgctgcaggtgaacaacattggtttcctaagagcaagctggattaaagtggaaactcaccgcttcgggaaagccaccgcgcaattgctaaatcaattcggttttgaagtcagttcaagcaaggcggacattttggtcattgctgatatttttgtgggtgaacctgagggaacagtggtgtattttgaagaagaggttgggtgcttactaaagcgacatagcttggaggccgtgcacattgatcttgtgaggggcgatagttttcctgtagttacatttgtcacatcggaaaattgcatgatattggataaggtgcgcagtttcaattgcttaacgagacattctgagaagttgatcatcttgtgcccaaatgccacttactcccccacctgattacaccaaagcaattttggccgcttgtatcggtttgtcattggctttgctcgtcggagtttactctcgtagcaccatacctgccgtgggagacaatttgcattcattgccgcacggcggaacatacctggacggcacaaagcgaatagtttacggcgctccaaataagctgaattctctggagggccaacgaactttatcaggtcaaccttgggccattgttatcgtgctgatagcggtaatcatattgttgagtcgattcaactccacttgcgcacactgcggtagatgtcattgaccgcaatttatttagccattggtctgctagtcttcagcgtgtctgtgtatttaattcagccaaatctgcaggattcgtgctcgatcgtgattactggggaaagtgtgcgaattctcaattgcagggtgactgaggccctacttcgatttgcactggaggcagagcccaagagcgtgaagatcccttaggtttactgggtttgatttgaatatggatcagaaaggaaaacaaagtgagagttcaagtcaagctgtggcccctgttccaaaaccaccgctgccccctccgatcaggggcgaagaggcggttaatgaaggcaatgaggaggcgaagatggagcgacgcctagctctcttgcatcagcgcttgaagggtgagcggaatggcacacgcattaccaatccgagctttgaaataggaaggcccagtctgacgaggcctgatgatatgaggagggatcccgccaacatattcagtaggttgtccatcgatgatctggcgcagatcaagccaacacctgtgtccaacaacatggctaactcggaggaaatggtcaagatcgctgtcgctgtggaagggctgggtgtacccactgaacaagttgcaaatgttgtactgcaggcggtgatttactgtgctagtgcaagtagctccgtgtatctggatccacatggtacaattgagtacacagggggagcagttgttcgtgattctgttgtagccatcatcaaaagggatgccgggttgaggagggtgtgtcggctttttgcgccgttggtctggaatcacatgttggtgcacaactcacctccctctgattgggctgctatgggcttccaatggaatgacagatttgcagccttcgactttttcgactatgttgaaaatgaagctgcgatacagccgttggatgggttgattcggaggcccacaaggtctgaaaagattgcgcacaacacacacaagcgacttgcactagacaaatcgaatagggatgaagtgttcgcaagtttggaaaccgaaatcacaggtgggaaaagaggaccagaaatcagcaggaatttccgaaatgcagccaattagccactatgaagccaagctcctagccgtgtctttagctatgtataagtttacgggacgttgtgagcccgctgttgctttaaatattgttaataaagcttgtaatgttggtatgggcaagagcagcttcgcgcgcaggcgtagggcggctctcctggggcgttgtcatagatgctttagaacttccatggccacacgttgcaatggtgtgacttgttatccgggcattggagctaagccaaaaatcgagatgttcatcaaatacggtgtaagtgagctgaaaccgtaattgagttgtgcataaaacctaattaattttaagtgtgcaactataaaataaataaagttttaaatatttttccttt

SEQ ID NO: 2739 - DNA, 6495 bp, Apple stem grooving virus
  source 1..6495: mol_type = other DNA
aaatttaacaggcttaatttccgcgctttacgtcaatggctttcacttacagaaaccccctcgaaattgcaatcaacaaacttcctagtaagcagtctgatcaactgctttccttgaccaccgacgagattgaaaagaccttagaagtgaccaaccgcttcttctctttttcaatcacaccagaagatcaagaattgttgactaagcatggtctaacacttgcacctatagggtttaagtcacactcccatccaatatccaaaatgatagaaaatcatctcctgtatatatgtgttccgagtcttttatcctcctttaagtcagttgcctttttttcacttagggaaaataaagtagacagttttcttaagatgcattcagtcttttcccatggaaaaattaaatctttggggatgtacaatgctataattgatgggaaagataaatataggtatggtgatgtagagttttcatcttttagggatagagtgattggtcttagagatcaatgccttacacgtaacaaatttccaaaagttctgtttcttcacgacgagttgcactttctaagtccatttgacatggctttcctatttgagacaatcccagaaattgatagagttgttgcaaccacagtttttccaatagaacttttattcggggacaaggtctctaaggaacccagggtttatacctacaaggtccatggctcttcattttcattttatccggatggtgttgcctctgagtgttacgaacagaatttggcaaattctaaatggcccttcacctgcagcggcatacaatgggctaacaggaaaattagggtaaccaagctacagagtctcttcgcccatcatgttttctcatttgacagggggagggcttgtaatgaatttaatcatttcgacaaacctagctgtctacttgcggaagaaatgcgccttttgaccaaaaggtttgataaagcagttattaacagaagcacagtctcttccctcagtacatacatggcttgtcttaaaactgcaaatgcggcttcagctgttgccaagctgaggcagttggagaagagggatctttacccagatgagttgaacttcgtctattcctttggagagcatttcaaaaattttgggatgagagatgactttgatgtgtcagttctacaatgggtcaaagacaaattttgccaggtcatgcctcacttcatcgccgccagtttctttgaaccaacagaatttcatttaaacatgcgcaaattgttgaatgatctggctactaaaggaatagaggttcccctttctgtgatcatcctggacaaagtcaacttcatagagaccagatttcatgccaggatgttcgacatagcacaggcaatcggggtgaacctagatttactggggaaaagatttgattatgaggctgagagtgaagagtacttttcagagaacggttacatctttatgccctctaaatcaaatccagagagaaattggattctaaattccggttcgctgaaaattgactattcaagattggtaagagccaggagatttagattgagaagagatttcctagatcccatatctaaaggaaaatcccctagaaaacaactcttcttggagtcaacgggaaacattaaatcaaatcccaatgctgaaaaaaatagcgagagcggcgaaataaagattgaaggcagtgccgaaaatgatcagccacatgaggtatcacatacttcaatggaaaccgaggatggacagggttttgaaggttcaataccagttgatttaatcaattgctttgaaccagaagaaatcaagcttccaaagagaagaaggaaaaatgattgcgtcttcaaggccatctctgcacacttggggattgactctcaagatttgttgaattttttggtaaatgaagacatatcagatgaattacttgattgcattgaagaggacaaaggactgtcacatgaaatgattgaagaagttttgatcacaaagggtctttcaatggtttatacttctgacttcaaagaaatggcagttcttaatagaaagtatggagtgaatggcaagatgtactgcacaattaaaggcaatcactgcgagctgagttccaaagagtgcttcatcagattattgaaagaaggtggtgaagcgcagatgtcaaatgaaaatctaaatgctgattccttgttcgaccttggaagatttgtgcataatagagacagggctgtcaagctagcaaaatcaatggcaagaggcacaacaggcctcctgaatgaattcgacctagaattctgcaagaacatggtgaccctttcggagttgtttcctgaaaacttttcttctgttgtcgggctaaggcttgggtttgcgggttctggtaaaacgcataaggtgcttcaatggattaattacactccaagtgtcaaaagaatgtttataagtccaaggagaatgctggcggatgaagttgaacctcaactcaagggaacggcctgtcaggtgcatacatgggagactgcacttaaaaaaatcgacggaacttttatggaagtttttgttgatgaaataggtttgtacccacctggataccttacactgctacagatgtgtgctttcagaaagattgttaagggacaaagtgaaaatttcttgaaaggcaaactgttggaattgtcaaagacttgcttaaacataagatgttttggtgatccattgcaattaaggtattactcagctgaagacaccaatctattggacaaaacacatgatattgacctcatgatcaagacgatcaagcacaaatatcttttccaagggtacaggttcggtcagtggtttcaagaactggtgaacatgcccactagagtggatgagtcgaaattctcaaggaagttctttgcagacatttcaagtgtaaaaactgaagattacggactcatcctagttgccaagagagaagataaaggtgtcttcgctggaagagttcctgtagcaacagtgagtgaatctcagggaatgaccattagcaaaagggtgttgatatgtttggaccaaaatctttttgccgggggagccaatgcagccattgttgcaataacaagatcaaaggtcggctttgactttatccttaaagggaattcattgaaagaggtacagaggatggcacaaaagacaatttggcagttcatcattgaagggaagtctattccgatggagaggatagtgaacatgaatcctggagccagcttttatgagagtcctttggatgttggaaattcatcaattcaagacaaagcttctaatgacctgttcataatgccttttataaatttggctgaggaagaagttgacccagaggaagttgttggggacgtaattcaacctgttgagtggttcaaatgtcatgtgcctgtcttcgacacagatccgacgcttgcggagatttttgataaggttgcagcaaaagaaaaaagggaattccagtctgtgctgggtctttcaaatcaatttcttgacatggaaaagaatggatgcaaaatagacatcttgccctttgcgcgacaaaatgtttttccacatcatcaagcgtctgatgatgttactttctgggcaggtgttcaaaaaagaattagaaagtcgaactggagaagggagaaatcgaagtttgaggaatttgaaagccaagggaaagaacttcttcaagaattcatctcaatgctaccgtttgaattcaaagtgaatatcaaggagattgaagatggagagaagagctttttagaaaaaagaaagctaaaatctgagaaaatgtgggcaaatcattcggagagatcagacattgactggaaacttgaccacgcctttctcttcatgaaatcacaatattgcacgaaggaagggaagatgttcaccgaagctaaagctggccaaactttggcctgtttccaacatatagtcctatttagatttggacccatgttgagagcaattgaaagtgcctttttgagaagctgtggagactcatactacatacactccgggaaaaacttcttctgcctggatagctttgtgacaaagaatgcaagtgtctttgatggattttcaattgagtcagactacacggcctttgactcatctcaggaccacgtcatattggcctttgaaatggcactgttacaatacctgggcgtgtcaaaggagtttcagctagattaccttagactgaaattaactctcggatgccgtctcggatcactagcaataatgaggttcacaggagaattttgcactttcttattcaacacatttgccaatatgctgtttactcaattgaagtacaagatagacccaaggaggcataggattttatttgctggggacgatatgtgttccttgagctctctcaaaagaaggagaggggagagagcgacaagattgatgaagagcttttccctaactgcagtagaagaggtgagaaaattcccaatgttttgtggatggtacttaagtccatatggtatcattaaatctccaaaattgctgtgggccaggatcaagatgatgagtgagagacagcttttgaaggaatgtgttgataattacctatttgaggcgatatttgcctacagattaggtgagaggctttacacaattttgaaagaagaggattttgaataccattatcttgtcataagattttttgttagaaattcaaaattgttaacagggttgagcaaaagcttgatatttgaaattggggagggcatcgggtccaaatggctatcgtcaacgtcaaccgcttcctcaaggaggtcgaatctacagacctcaaaattgatgctatctcgtcctcagagctttacaaggatgcaacctttttcaaaccagacgtgcttaattgcatcaaaaggtttgaatcaaacgtcaaggtttcctctcgatctggtgacggcctcgtcctgtctgatttcaaactgcttgatgacaccgaaattgattcaatcaggaagaaaagcaacaagtacaaatacttacactatggagtcatcctggttgggatcaaagcaatgttgccaaactttagaggcatggaagggagagtcattgtatatgatggagcctgcctggatccgaaaagaggccacatttgctcgtatcttttcaagtttgagtctgactgttgctactttggtctcaggccagagcactgtttgtctaccacagacgcaaatttggccaaaaggtttagatttcgtgtggactttgattgtccacaatatgaacaggacactgagttgtttgctcttgacattggagttgcatacagatgcgtcaactctgcaaggtttttggaaaccaaaactggcgattcaggatgggcttcacaggcaatcagcggctgtgaagcacttaaattcaatgaggaaatcaagatggccatcctggatcgcagatccccgctgtttctggaagaaggtgcaccaaacgtgcacattgaaaagagattgttcagaggtgacaaggttagaaggtcacgctcaatttccgctaaaagggggccaaactcaagggtgcaagaaaagagaggatttaggtccctctcggctagaattgaaagatttggaaaaaatgagtttggaagacgtgcttcagcaagcgaggcgccaccgggtaggagtatatctatggaagactcacatagacccggcaaaggaacttctgacggttcctccccctgaaggatttaaggaaggtgaaagctttgagggcaaagagctttaccttcttctttgcaaccattactgtaaatacttgttcggtaatattgctgtctttgggtcatctgataagacccagtttcccgctgttggatttgatacacctccggttcattataatttgacaacgaccccaaaggaaggggagactgacgaaggaaggaaggccagagcgggttcgtctggcgaaaaaacaaaaatttggaggatcgatttgtcaaatgttgttcctgaattgaaaacctttgctgccacttccaggcagaactctttgaacgaatgtacgttcagaaagctttgcgagccatttgccgatttggctcgagaatttctacatgaaaggtggtctaagggattggccaccaatatttacaagaaatggcccaaagctttcgaaaaaagtccatgggtggcctttgattttgccactggtctgaaaatgaatcgtctaacacctgatgagaaacaggtgattgatagaatgaccaaaagactttttcgtactgaaggacaaaaaggggttttcgaggcaggttcggaaagtaacctggaactggagggttaggagtcgtgtgaaattccgcaaacttggtcgcggtcttgcaggttgacatgcctgcctttatacttaattaaagggttcccccggttttctgagcatttccgggttagtgtggtttttctagagtctagagtttgtccactct

SEQ ID NO: 2740 - DNA, 8747 bp, Citrus leaf blotch virus, complete genome
  source 1..8747: mol_type = other DNA
gaaaagcaacgaaagcaacctacacaacccaaaattaatatattgcaataactgttatcactcaatataagccatggctttgatgagcaacaaaactgcaattgaatctattttgggtaactttgaaaagaaacacgtcgatgcaatctacaatgccgccgcacaaactatcctctctcactctgaatttaggaataagcattttgcttattcactcaattcttatcaaaagaagatagcctcaaaggtgggtattgaattgtatccaaatggttatttaccacattcccatccattgtcaaaaatttttgagaaccatttgctttttgatgtacttcctggcgtagtaaatactagtagattagttatgtgtagcataaaggagtccaaagttctggtttttaaagggattcgcgacaaatccagaagacaggtttcagacctcaatgccctcaattccttaaataatagtcatacatcattcattaataggttagttgcatccaaagatgtgagtagatatacggaagaagctgatgctttttttcaatccaagaaagggagtccggagctattttcaaggaatttcatcaaaagcttggaaaataaagaggctgttttttttcatgatgaagttcatcactggactaaggcccaaatgttctcatttcttaaaagcacgaaggtcaaaaggttcattttcactgtagtctatccaccagaaattctcaaaaaatttgccaattcccagaacccaaaggtttatgatttcaaagttgataagggtcggctttttttttttccggatggggttaagacagaggcctatgagcagaaattgaatatggagtggctcttttcagcatcacatcttcgcagtggagactgtgtatggactgtaacaagacataagagtatttatgctcatcacctgtttgagatatccattggcgaactagtcacggactcaaaactttttttttccgattataactccattgacatgtctaaaatatttcttgatcgttttcggagttatgaggtattccccatttcgattgagcacctttataaggtctactcttatctgctttgcctcaaaaaacctgacttggagagtggtctagctaaattaaggcaaattattggagatgatgtcgaaatcaaagaattcctcttctttgaacaattttgtaagcgcttaattgaacgccaaacctcttgggggctatttgggcactctttctttgaaaaattaaccgatatggcattgtcatccttgcccaactctatagcccgaatttttcctcaatggaaaaaaaaaaacacatttgagttccttttctcacttgggactcttgttgtggatgtggagagaaaggtgtgttttgaacatgtgcttgaggaatggggatttgaagttgttatcactgatgaaaatgcctatcttgatccactatctatctttgctatcaatgaaaattttaatgaggatagagtggacgatggttatttggaaagaatccgtcttcccttctggaatctgaatgactatgacttgaaaagaaagagggtaaatgcgtataacattctctcttatcgatttgaagaggagcgaaaaattgaatcagcgcaaaaaggtccaaataagatgctccagattgagtggtacgggattaaagaatttaaagttgacccttttatcagcaactccataactgaatttactcttttagaagcattgctgggaaagaggatagatccaaaaaaatactcatattcaaagcaagcctgcactctttccaactatctcacatttttgtgtgctgagggtttggatggattcaatttggaagagcaccttgaacgaaggttgaaagcggccggtcatgacgtttcagatgacgaggaggaagaattgacttcagctgaacaagcggggcctatcaagatattggctgatccacttggttttatgaaagagtgtttggaggagatcccaatcgaaactgaaccatcactggaagaaagagggcagttttccactgattatcattctgagaaatttgaaatcaattacaatgacatttttaatcctcacaattgcatgaacactcacggcgatgaaattcccacaccgtcagatggcaattgttttttttcagcatttactgaaacttttgaagttgaaagacctgacaccttgaggtctgatttctcagactggcttatggaatttaatggggggtcctatgcttcacttgcagaaatgatcagaccgaatggagtttttatggaggcagaactcatatacttgttttgtgtatttagaggagtcacgttgattattcatgatagaactcatgaaaaagagaatgtttatgctgtacaccgcgggtttgaggagggccatatggtacatagaggcaatcattttgtcgggattgaaacttacaatattagtactttaacctcagaccccttacttggtgacatcccatgcggtttttcagaggaaattacaaaattccattttcggcctgatcatttcaactgtgcccagttcagaggaaggaaggcggcttttatcaccaaagttgatgcagattacgggcacaacggtatggtttacccccacaattcatgggtaccttctttagaagagatcattcagatctgtggtcagggagatgatttcaattgtgcattaataaatttctatgaggcaaactcatctcttgggttccatagggataatgaacgggtgtacaatgatgatcctattttgaccgtctgcacattcggtgaaggtagattcaccattgaatttaaggatcaggtaacttcttttctaatgactgctggctctttctttttaatgcctaaagggttccagaagaaggcaagacactctgtctcaaatgaaatgtcgagagtctcgattactttcaggaagcatgttagaaggttgaatgggtcaccgattgccatcagggaagaaaattacaaaaatacatgcctcattaatgccttttcaaaagcaatgaaaaggagcaaacaggcaatcattgcaaaactgaagactgttaatagccctttctggagtagatacctatctgagggtaacggtggctccattgaagattgtcaatcggcctgtgaggcactggatgttactgtcgaccttaatgtaaatggaaaatgtgtggttcttggaaaaggggctttaagaatctcaatggctttaagaaacaaccatttttcagttatcaatgctgcacaactgatggagaggacttttgttagccacttgcttgaaaaaggaaatgtcaatgtgttagaaggatttgacgcaatgctaagtggtgatgtgggcgcagcaggtgttaacaaaattcaatttgcagccaattttgaatttgctagaattttggcaaattcatttctaaatatgacaactggcatctgcctgggcaaggcattggataatggggaaaagtattttctccacattttgaaagatagagtgaaacagattggtatagacgtcacaatggtgtgcggatttgctggatcggggaaaagtcgcaaactgcagtcctggctgcattcaaggaaaaaagggaacttctgtgtggtttccccaagaacaaacttagccgctgactgggcattcaagttagaattagagcccaatgaacagagaaaggtttcaacatttgaaaaattcatcaaaactgataaaagcaaattagatctcatagttattgatgaattgacattgtttccaaatggttacctggatctcctcgtgtatgaattggctgatgtcaataggcattgtcaaatcatccttctgtttgatccattgcaagcaagataccacaacaaaatggatgaatcaatcctgacatttgaacatgacgtggacaggcttattggtggacagaacattgagtacatttacagcacgcatcggatgtccagatacttcaatagattttttgatgtaccttgcttcaatcaggctgatagaacagaggaacaaaggttgtggatatttgatgacgtttactccataccatccatttgctccgaccgtcaggaaccatgtgatgttcttttggttgaatctgaccttgaaaagaaggcattttcacccatcataaatgttatgacatttggtgaatcccagggactcacatttaatcatgtttgtattttgctgtcagagtccagtgcagcttcaaacgaatttagatggatggtggcgctgacgagagcaaggaccaggttttcactctgttcaaccttcttaggtggaattgaagaatttaaagtcaaaaggaaggaaagtctcatcacatccatactccaaggcgagaagatcacattcaacagattaaatctgatgctgaaatgcaatttaattaggagagaaaaagaaaatgggtgcagagatgaggtcgatagggaggaaaggttggagggtgaccctttcctcaaaccatttatcttcttgggacaaagagttgagaaggatgaagatgaggtagaagaagtgaagatcagggaaccaacctgtcaaactcatctgtatataacagagcctaattttggtttgtgctacaatttcgacttcattagggaaaaagaacagcgggaatacagagaggatatgcttgtaactaaccaattctgtgacagttatgataaggttcatataaacggcaaaagagaaacccctggtcccctgcgattcaaagcgatttatccaaagcactcagccgatgatgacatgacgttctggatggccgtcagaaaaaggcttgtatttagagaagaggaggagaattatcaaaggttgtcaagggcgcatttagttgggggtttgctatacaccaacttcaaaaaaaaaatgggcctggaatttacgtttgaccaaggtctactggaggaaagcataaatgcatttgaaaagaaaaagctggaaaaatcatgtggcacaattaaatctcatagcataaggtcggacattgattgggcgctgaatgatgtatttcttttcatgaaaagccagttatgcaccaagtacgaaaaacaatttgttgatgctaaagcgggtcaaactcttgcctgttttcagcacctgattttggtacagttcgctccatggtgtagatacctagaaacccagatcagaaatcagttgcctgaagaaatttacattcactcaaataaaaattttgatgatttgaatgcatgggtcaaaaaatttttccagagggatatctgtgttgagtctgattatgaagcatttgatgcaagccaggatgaatacatattatccttcgagattcatctgatgaaagatgcgcattttccgcagaaaatcattgatgcatacatagaccttaaatgcaaattgggatgcaaattgggccatttttcaataatgagatttacaggggaattttgcaccttcctattcaacacactggccaatatggcattcactatgtgtagatacgaatggaggagaggacaaccaattgcattcgcaggagatgatatgtgtgcattaaacaatttggctgtttgtcatgatttcgatgacctttttgaactcatcagcctaaaagctaaggtggaaaggacagaaaccccaatgttttgtggatggagactaactccatatgggattgtgaaggagcctgaattagtctataatcgctttcaagtggccattgaagagggaaaggtcttggagtgtctggaaaattatgcaatcgaggtttcttatgcctacagtttaagtgagaggctgtatgaagttttgaaaagtgaaaggcaagttcagtatcatcaagctgtggttagatttatagtcacgcacattgacaaactcaaaacaaaagtgagggaccttttcttagaacaatcttccgacgaagatatctgatggcatccctgatcaatgtaagttcacttgtaaatagggtgaagttggatcaaagtataataggtagtgatgaaataaacaaactgtatggttccgatgcaccattggtgttcaaagatgaagttaaaatggttattcctgggaatgctgagggtgaggcaatcaaattgcaagcaaatattctgaccgctgacagattgcagtcaataagaaatgcaaaagtcaatggcaaagaagcggcttatctgcatttgggatttgttccaattgcaattagatctctattaccttctggaaatgaacagatctggggtagatgcgcactggtagatactagcagaactcgagccgaaacagctgttattgatgaatttgaattcaagttcacaaagaaacagccatttgctgcaaaactactaaccatcaacgctgcagtggatattaattgcaaagtgagtgtcggtagcattcaggtgctgctggagctccatggtgttgatctgagggaagaacgttctgtagcagcaatcatcactggcttaacatgcactcccaccaacaaaatggtgttgctgcataagatagagtgcgacacgcccaaatggtctttgtgcaatataatagagcaggttgaggatgaggaagaatccaagaaggcatttgaaaacatgtttaatgcatcttcttccaacttgatcgacttgggtcaagaacagtggctcgacgaaggtaagcgaacacctttgattggcagcttggcaattaaagggtttggacgcaaagtgatgcctgttcgcagacgaaacctcaccacgagaaatctcatgaaggattatgtgtctcatgttaagtcagagacggcttcactgaaaagaagtcaaagtggaagagattggggtaatgatagattgagaaaatatctagaagagcaggctctggagcaggccagatcatcgactgatcatcagttggttaaagcaccaaaatttaaaaccatcgaagtgactggtttggaaactgtgcatgatctaaaagataaaattgacaaggcagagtcttcaactgccagtgacactggaaccaagtgagtataacgtgtgactagtgtaaatagttagtacttatttgaattaatatagatagtgtacatccatgaaaatcaccaatgataatgccgcaactatcaactattggttagccatagttgaaccattcctcacatctgatgaggacagaaattctgatgacatcattcgaaaattcagagctgtagtggccgagcatggagacacagaggaggtggaccctgaggtcttcttcgccattttttccatcttggccacaaagtacggcagagtttattcaaaaaaagttgaagaattgaatgagtcactcaaagctgcaattttggctggggcagaagcagaagatctgagaaacaagttgaaagacatttcccaaagatatgcatcacagcttgagatcacagcagatagagagcagcagcttgaaagtttgaaaaaaaaagggcatgagcaaccactgaccggcagtggatcttctgaaccggtacatgctgaatcagcacacgctccacagttgcatgtggtgaatgatctgcaacaattctacataccattcaatgaatacccaagtctaactcagtcaataggtacttctgacattgcaaatgatgagcacctcaaaagagtgcaacttacgcttaagattacagacacgaaggtcttttcaagaactggatttgaatttgcgataagttgtggatcaagaagtacgtcagacaaggacccatatgatggtataatcaagatcagcggaaaaagtcatatgaggaaagatatagcatatgcaataagaacttcgggaatcactgtgaggcaattctgtgcagcctttgcgaatctatattggaatttcaatttggccagaaatactcctcctgaaaactggaggaagaaggggttcacagagggaacaaagtttgcagcttttgactttttctatgcagtaggtagcaatgcagcaattccaactgaagctgatgggagcgttagactgataaggcctccaacaaatgaagaaaatgaggctaactctgctatgaggtatgctgacatatacgagcaaaattcaaaaacagctggacatgtaacttcaagtccactgtacaatcgtgggagcagttatgagagcaaaaacaaagcaaaactcttagaaatgtagtcccgaattctggcatgggcggatgggtgggccaggactttacactcttaaagtataagtaaggggtaactcagccgcacgggtgaagattgtgcggagcctcatgaatctgaatccaagatgctaaaggggataccgcgatctgaggggtcatgggggttagcctgaagaacagaacactcattaagtatgtggtgacgcaggtcccgacaacccaaaaaggtgagctgaacctgatccaattggagcagtacaggtaaagttatatcctttctataaattgaaaggtagtttggacagatacatgtcattcaattggtgtggaacgttagtccaaatgaaacatttatgcttggatggaaagtcaagcaaacgttgtcaatgtgtacgtgaaattgtcaaataaacctcagcaatttctatgccctctttgtgctgagtattgtagagggtgaaggtgtgttttccattttatacgtcaataaaataaaatatgtattacttaaatacacatagggatgtcttttaagaacttttagac

SEQ ID NO: 2741 - DNA, 6812 bp, Apple latent spherical virus segment 1
  source 1..6812: mol_type = other DNA
tccgttttagagcttgtgagttgttattacgttttgttgtttgaatctctgttttgttactctgatttccttcacgtttgcaccttacactctctaccgataaacattatcatcttttattttgaattttatttgaaaaatttttatattttcaatgtcaatcactactcctgtagtgattcgctttgggagttttgactcccctgctgcggcacagattgccgatactaaggaggaggaaactcctctctctcgccttgcagctttaaatcgcaaggctcaaattgctgctcgttcaagagtagcagctgctgcggcacagtatgccgaagagcaggagacactagttctcactgctcaatccatgagggatgctctccctttatggatgaggggtcttgttgcccccgctcccaaatccaaacgcgctctcaacgcgaggcgcgccgtaaggcgtgggaagcctctgaggaggctgcctgggttcgtgactacggtcgtgaacccacttcccctctctctgtttgggagggcactcctgagctccttgctatggagcatgcttaccttgccaagcaaggtgataagcgcatctgcgctcatttgcgcagacaggctctgcgggctgcctacaaagcccgatgtcaaaagagggcctttaaggtcttccaggaagaatgtgaattcttccgtctccctgtccacattgtggacaaaatccaaatcccagggcaggctagccccgtgccagagagcgtatctctgggtggcggtgttaaaaccgctacttctaagcgccaagtgaaaactcggcgctctttctcttctttcctcccaaaggaggaattttcctttgtgttgggcccttgcccaacatcttcccctgaggttactccaacctcaaccccttcaaccacccccccttcttctccacgggcatcttcgcccagaacccccttgcctcaggttaaagaggtgaccacacagggtattactctgtgttctcatgggcctgcttgtcaggaacatttttgttttggttttctagatctcaaagatgagtttcatgcttccacttatttaaagtggatgcttggaacccaactacctgggtctattttttgttttgacctccaagtttctagttatctagagcactgtacagatacaatggaggctattgatctgtggtggcatgttatggatcgttatgtgcgtaattacagagctaccaaatatgtcactaaagacaattacttaacaaaggctagcattgctattgatactgctcctaaagagtttatcaataagtgtaaattgttgaccaagcgtgcgaagcatcgaaatttgtcaaagaaagaatcttatcttcttaaaagaaatgaaagagattctaaatattgggatgcttttatagccttacgtactaatactaaagaaggtcaaggacctatagattgggtgaaggctggttatcgtaaatgtaaagaatactatgataacaccttctccaaatttgtaaatcaaattatgcaatcccttaatcctctaactatgatcctaggaccgtttaagtctgctttttgggaatgcgtttcaaatctcaaagataaatgtgttggtatgataaacgatcattggcttgcttttgcagcaggttcaacacttgttttgaccctcatatttctttttgcgatgatttgcatttgtaaagtttttgtatatttactatctactctaggtatagttgggtgtacagttacttttcttgtaacttctttaatagttattttctttttatttaatggttttctcgaacaagctgcagatattcaactttgtgagcttgttggagctgattttttaaattttttgaaccaaaatcaaaacatcgctcctattgctgccacaatggctgatattaaagaggaagctctcagagggcaagggttgcaatggtgttttacagctttgtataaattaatttctagattaattcctggtggagctaaggaagctgccatcatgtttaatagcgtaggtaatatcagtcgaagcgcaagtcatgccaaggatttctttgtaaatatgaaggaaatgactacttcttggattgacgccctctctgatgccctggctcttctaggagatgactctgtgactgctatgcacacattaaagcatctctgtgagaatgatttcttggaatgggctaagagagttgagcgctatgcaggtgatacatatgattctatgattttgaatcctgcagatcgacttaggataattagggaattagttgaccaacaagtgggctttcaaaaagccttctttaaccccagaatagcttcaaaggcacctagattgatgctcactgaatttcagcgcttatcaactatgttgagagattgccacagtgcactttctcgagctgccctctttgatatgcaaagagttcctcccttttggatacatttgtattcagagaatggcggcacaggaaagtccatggcaatgatgcctttgggtaattatttgttagattctattgaggaacctaagacccatagattcgttactaggaatgtagcctctcgatttttgaatggctaccttcaccaaccttgtttcctcatggacgagtttggtgcagctcctaagacggactatatggacgaagtcactatgttggatctcgtttctcctaaccctttaacgttgaacatggcagctcttggtgacaagaatatcatgttcacttcaaaattaattatttcaactgctaatcgtaggctagctcaccctgatgtaaaacttggggctaatttagatggctttctcagaagacgccacattttggctgaggtggtgttggctcaagggaagccatattttcatgaatttattcttttgaaagcgcgaactgagcagaaaatttatttggatcaagcattgcgagaagttgcaagccccatccatttaagtcctgctgaattttatgcagtttgcgctgagcaatttgtaaattttttaaatcaacaagggaatgctctcattgaacagcagggagtttcctatgttagatctgacgatttttcttttctcaaggattatttgcagtataagatgggtcttgattttcaacaatgtgaaatagagagaatagttactgattattctctctctattaaaaatcaaactatctttccagctgagcatgaacatattttctccagatggagggctgaattagaagcattatccttgtctgaactaattaccatgctcgataagcatgttaccgaaacttttgtatatactctaattaaagagaatcactcaaatgtggttatgtctaacctaacaccttacgagtgcttaatttattctttttgtaaagataagtataagaaagaaactgatgcaaccttctcttctcttcctgaagaggaagttaagcagccttggcttgcagaatttctttcatttacggcaaggctatgtctcaatgtgcccaaatgggtcacattggtcctagccttgtgtgctttttgccttgtaggttatgtactaattaaatttgctataggtttgtttacaggtgcttgtacaatttttagtgttttagctttttcctctttgtctgctcagggtcctgaggattctcctggattcgaaaacgctaggaaaactgctggggttaaggtgcatttcgttaaaacatccttccaaccttctgactggaaggggattaacgttaagccctctggatttaattggggggacgttgctgatgacgatgatgctatccctttgtggggtcaagggcctgatcagaatcaaaacgttctcaatcttttgaaacaccaagttgttttaatagcagagcattccaaggttgtatataatgctatagcccttggaaatagaaattttttgtttactaaacacgtttgggatctcatgccaacctgtaattatggtttattcgggtatgcgattgctaaaaataaaatatacattaatcctaatgttagaccagccattcaattaaaaaatagagatttggttgttgtacagttgcctgattctgttcctcccttctcagccttacctaaggatatttttctaagtaacttagctgaagcacctaaggttgctaacgctgctcttgttgtatcagagccattgtacgagaaacgttcagtggctcaactacaacaaaagatttacccttttgagaacctaccccaaattcatagtagagacacttactcttgtgggtctttgggctcaaagcctatgcctgcctgttattcttatacttttgatacttttgcgggcttatgcacttcacctcttatttctatggatggcggcaggtgcgttttactaggtttacatgtagctggagataaaagtaagatggggtatgcacagatagttaccctggaagacttctccgatattaacttttctgagaaggttggacaaggacccgagcaaatgtatataccaactgctcgatctgaatcctttggatcagtctgtcttcttgggaaatggactggccctaagccttattttttagagaatagttctttaactccctctctaattcatgactgtatagatatagacatgacaacggagcctgctattctttctaagaaagatcccagacttcaatacactaacaataaagattttgatccttttctctcaggtatgggaaagtatgctgttgaggctcactcctttgatgaagatgaagaattgtttgaggatgctctagatcgagttttctcagagatacctatgtttacctgtgaagatttatctaatgatcaggtatgcaatggtatagaggacgatgattatgctgaaggattggttatgcagactgctgaaggttaccccttctgcactatgcggcccccaggagtcacaggaaagacgtggctttttgcgggatcaccaggtgattggcacatagtccccaattctcttcttgctaacgaacttaatgtcaaagagttgaaccttagcaagaatatttttgaaccagtgataggtatagattttcccaaggatgagaaagttgattcttctaaagtgtacataaaacaaaaaactcgactttttactatcctacctgttgattataatattttagttaggaaatattttctttcttttgtttcacaacttatggccctccataatgaagttcctacaaaggtaggtattgatccaatttctaatgaatggtctattctttgtcattctcttcactcaaaaggaaccaattggttcaacggagattattccagatttgatggaataacacctcgtaatgtgcttcagggcattgtgaagagaatttcgcgtagatatgctaacaagagttcttttgctataacagatcctacactttctatcaatggtgatcttgctagatcccttttgatggatatgtgtagcactcgatatgggctaactaatggggacctttggtatgtcacttctggtataccttcaggatttcccttaaccgttatagttaattctttagttaattctttctttgtgcactttgcttatatgaagcttcattcttctgaagtgcacaaggctttgtatcctctttattcttttagaacccttgtatcatatgctgtttatggggatgataatctaatttctgtacatgacacaattaaagatacttttaatttagttactatatctaacttattgttggagcatggtgtgactcttaagaatggagccgataaaaatgaggaaattttatctccattctatcctatagagaaggtggattttctcaagagacgattcaccactttacaaggacatattgttgctccacttaacactgttaatataactgagcgcttgcactgggttcgtaagggcctaggtgatgctgatgccacacttgagaactgtaaatcagctctctttgaagctttatttcatggagagctgtattacaatgatcttcgaggcaaaattgaaaaagcttgtaaagtgaagggccttcctttgatagtcccagattaccaagacgctctttctttatttttaactggaggctcatatgctaaggctattcaggctatagcgatgaatctccctgatagaatctctctgtacaaatctgaattctatagtgtacaaatatatcctcaaattttttatgtgaccaatgagagaaatgtcacacttcagaaattgctggagaccactactctccgtaacatttgttatgtttctaggaactacgagtctaggagcagttctaggggtcttttcactcttaagggtgaaggttggactccagctgctttgaaagctcgtcttagtgtgtacaaagctatggccaaacctgtttacttcgtagatgaggctaatgatggtttggctatgttttattgcttagattatgcttttcgtgtttgtggtttaacccggagtcaaattgcaaaaattcttaatgcagtttttggtggtaaccccgaagtctgccaaagaattttccaatttttctctcaagtcgagccaaccaataagtacattcctcccaatcaaaggaggtaatttgtttggtctttcttccttcttttctttctttctttcttttgaactagtttgttctcgtgatccttggatccgttaaggtttcttgctggttcttccttaagatgagaacatgaaccagtctagttctttttgtttgctgtttattttatttcagtgtgtttgaaaagagtcggatagtccaatcc

SEQ ID NO: 2742 - DNA, 8170 bp, Soybean latent spherical virus isolate ND1
  source 1..8170: mol_type = other DNA
tttaatatttgcaatgtctttccattgtccaagttctacttgccttggttacactcaatctttctctcgccgtgatatgcgagagcaaggggatcgttgtccccatgctatgtgtggtgctcttctagtgaagaaggtgcccactttatccccacagggtgccagacctgtggtatcaaagaccactgttgtggtccctcctcaagccactgaggaggttttgtattatgggtgtgcccccagacccgcttttcttgaagcggttttggcggccccaaaattaaagatggctccaccagtggtggatgcgatggaagtcgcatacctccgtggtgttgcagccatggaagctgaggagaagaaactcctcaggaaagaaaaggctgcagttgtggcccgtgctaaggcacggcgagctgcaaggaaggcagccaagaagcaagttgccgagatgaaggcaactgtggccctgaaattggccacaaggcaaaaaactgcacgtttgagtgcagctaagagggccatgaaggccaaaagaaaggcagccaaggaggctgccaggttggcgcttgaagagcgccgtgctgcgggtttaacccgcaaatcggccttcaggcgtagcctgaaaaagaaagccactaagatggctggtaggaaggtccctaagacctccacttccacctttcccaaggtggaatctttttcttgttttccttcttctcccctccctgcttttattagggaggaacagccctgggtggctgtgaataccccctgccctcatcctgagggcttcgatttggcggttgatcccgcctttgtggctcctattgtggggccaatcgttagtgtgccatttatggcacctgttgtgaaggcttttaatagccttgtagaaattttggcggctatcaattatgaggccgctgtagatttaagagcctacattttagaaatagcttcttacgaaaatttctttgctttacggagaatttttgttggaaaagctttatcttggatggctcttatcctacctctttatccctatgcgggcatctttgatacttatctcccacttgatatggtggaagataagaattgtgatgcttatttagcctcattacagcagactgcagtgatggtgctggaagtgacccagggaccaatggacgcacattctatctttgatatagtgcgttccgttggttctaaggttgctagcataaaggacaaggtagtgggatgtatagttgagaaatctgctgccctgttggacactgttatagacacagcaaagggcatgttttttggagttcttggcccataccttgcccgcgcacagaagatcggagaggaaattaaaaaattctgggataactgtgtcgagtgggcaacaaaattgtggcaaggagctcatatagcattacaagctcttggcatttatgctgtttgggctatagttgctatggtgcttgtaggagtaatgtatatattagaaacaattttgatttgtttaggtgtaatgagtggtcatggtgtccttgttgttgctttgacaggggcagtcatgacttttttaggttttactgtttttcagatggggcgtgagtatatacattttttgaccgccctacgtcaaatcattttcttagcagttattccccaaggaggattgactcaagttaatatcatggattcgtccgttgatgttactgagccacactccttgttagatactgctatggcaccagttcattttttggaaactgttgccagtggtttaacattcttttcttctacctctgttacagtcttaggtaaattaggaaattctctggagggaattcgcaaaggttttaattgcctacgcgattttacttccgttttgttagaacaatttggaaatgcttttgaatacatttccggtaagagaacgtctttcttccgtgatcttgcgtgtgcagttaaagtagatatcgctcgatggacccaggatgcacgggaaaccattgagtattttgaaatttcaggttcccttgataggtatgagtattatcgtgctcgtgagcttatctatcaaggtcaagatttgatcgacaccgccaacaaagctcgtagttcgcacacaagtgtaaaattcttgcgaactattggcaagttggttgaggaactaaaagaaattcgtgctaagtgtgcacgaagtttaaaattcccaggatggcgtcgacagcctttttgggtatattgttttggtgagagtcaatgtggcaaatctactttggcaaattatttgatgccattgttgatgtctcacatgggttgggatcctcaggatgtttacagcaaggatcccgttgatggttactggtccggatattatcagcagaagggtttaaagataaatgatttatctgctgttaattccaaagatgtagcgcccctcgagcagcagttgataccattgatatccactgaggagaaaatggtgtcttcggctgaaattgaaggaaaaggaatgcagtttgcctctgaaattgtagtttcttcatccaattttaatgatgcaccaactggtgctgaaattttggatgcagatgcttacagacagagacgaaaggttttgatgcgctgcagaagggctgctgagtgggttcataatgctgatggtacgcgcacagagaagcttgatgctgagggcaaaattgtatataagccctatgatccatccaatgctttatcttgtaccgaggtgcaatggattcatcctgtttcatttacagctcttcccggaccctgtgggcagtggcacttagccgagttcaccatacctatggtgaaggaggctatggatgcccactttttgcaagaagaaacaaagatggcatcctggaagtcgagccttggcatgaagagtcaaacagcaaggaaaatgggttcatacttgcaggatatgattaagggtattggtaattttgttacccttaaaggagcaaaagattcagatcctcgttatttgctggtagctgttgatggaaaatgctatgcgttagaccagcaagggaaagccactccttatgaggattgtgatgttgttgaagaaattgagcggctaactttgttgcaataccgctcttatttcgcggacttggtaatggaacatgctgacaatacatattatcaagattcattccattcatcaacagtccgagattttttgttggctctaatgaaagatgggtcaactgttttgtctgtggatagtctgggtagtagtactcaggacattcacaaagaattatgggcagaattgggactttcagaaaagatttttctgagggtttcacaaatagctcgtaatcaattgcgcgatgctccacattttaaggaagacgttgcgcacaattttttggaaactatgaggcatcttagggatgctattgtagatagaaaggaacaaattcttttattttttgcagcagtagctttagtgggcttgtttagttggggttttttgagcctaattaaacaatttgcttgtggttctttaggatttggtgctggcatcgcattgcgtgagcaaattgctcatagtagtgttatgtcttcaggtagtgtgactagtgcctttgttgcacgcaacatgccagttgtatggggcaaagctgctaggtatgccactgcacactcaagcaaagaagaagtgggcgccaattttgattattttgaagatgctagtgctcatttgttagctcgtgttgttggctcatctggtcagtctgagacctgccttttatttggtcatcaggctattgcactttgtgcgcaccagttgagattgtttcctgacaatgacagggtgactatccattatttttcaaaggagaggcgccctgtttgtttttcatttacttggcattatattaatgctattgagtggcctgactgtgaagtaattgtatatagagatgcacagctcacgccactccctgtatatagtgatgataattatttgtgtggggagcaaacattgcccacagttttaacgataactgggctctcaattaagaagaagaaattctttgatgattccacgttgtgcccaagcgaaaaaattctggacggtgaaatgcccatcgtccggagctggaaagataccgcttctctgagaacgcaagtccagacaattttgtccgagactcatagaagagatataaataggtattatacttctagttacccatcagggaaacatgatagtggaggtataataactgcagttataaatgggaagcgtaaagtgataggcatgcactgtgcgggggcgcaaaatgggaaaatttatgttagtaccattggtcttttgcccacccgcaacattaatgatgcacactctgctgccgattattttgttccaagtattggcagggaggaaaaaggattttgcaagattggttggattgcagatccttcaaagagaccacatgctgccactaagactgcattggcaccagttcctaaggaattggctttgccattgccagagggagtgtctgtaaagattccttctattttaagtgcagcagatccacgcctgcgtgatgaggtgaatcctgaatttaaggattatgatcctctacgcgtaggtatggataaatttgccaaccccatggatccgcttgatgatgaagttttacagcgggtctgtgaagatatttatgaaacctggtatgactgtttaccaatactagatgatgagaaggtcttcttgcaaaagacctccttggaggtggcgttgaacggtataccgggtgaggcttgctatgaagccatgaggttggatacatctgagggttatccttttgttttagaaaggaaaccaggggagagcggcaaactcagttatgtacatattgatgagaatggcgttcgttcccttattcctggtacatcggtttttagagattaccatgaattgtcagcaagtatactgacccaagtgcctgtgttgaattgcattgaatgtcctaaagatgagttgctaaaaccatctaaagttttggagaaaccaggcacacggcttttcgatgtactcccctttacacataatattcttttgagggagtattttttaaatttttgtgtttttctccaacaaaatagggtgcatttgccctgttctgttggtgttaatccatattctcgcgagtggacctggctttttgataggttggctgcgaagagtgataaagctttgaattgtgattatagtaaatttgatgggcttatatcacatcaagtctacatgcacatggttgcaaccattaaccgactctttagagatggtgaggaagcaaattgtgcgcgtaagaacttgtttttaatgtttacatcacgcaggagcatctgctatgatcaggtttatatggtcaaaggtggaatgccttctggatgcgcactcactgtaattattaattcaattttgaatgaaattttagtgcgctatgtctatagaataaccgtcccaatgccagccaaaaactattttaataaatacgttgaattggtggtatatggtgatgataatttaattgccatacatgatgatgtggtctctttttttgatgggcccattattaaggaaaaattggcagaggttggggtgaccattacggatggtactgataaatcatcacccaccttgttacgcaaaccgctggagtctcttgattttttgaagaggggctttaggaaaattgaagggggaatgtattcttgccctctggataaagggtccctttactcccggttatattacagtgctggaggtaaagggggcctttttcaacttgatatcctccacgataatgttaaatctttcttggaggaactgacgcatcatgctgatcattatgaagagtttcaaagagtgcgcagtttttatattaagcgtattccttcatggtcagctacgctgcctacctatgctacatgtctgaatatgatggaggggcagcggaattcagcaacaccctggcaaccacataaatttatagaaacgcggccttcaggttgcgaaactaaaatgatggcgggccaggataatcatgctcagaagatatgtgtaactgagcgtataattatatgtggtgaaaaatatacgccaccaatactggagacctcttttgttgtttcaatagacaaccccctttatattggtgaaaggggggagtatgttaaaacagagtttggttcaggtatggggcgactgcctactgatgcctggatcaaagctttctccagtcccaagaagcacccacagctttttgaagcttataagatgggtgctactatatattttagatcctgcatgccctatttaaatgcatggtgtgcagtgtgtaagtttgcattggctcatggaatcgatcagagttctattattgctatgtatgagtcatgcaaaccaagaggggcgggcgacattgctcctcttgtggccgtaaaggcatacactaaatttgtgaacagaccagtgtttaaatttaaagagactgttcataaggaagtgctcgaagcacacaatagtgtgcgagtcgcctaaaatgagggcgcttcctttctttactagtttctttgtaaaagtaaactagtccttgggggcaggtagctccctccagcagcttggcacttgattagctttaatagtgttagctacccttcagcaaggtaggagctgcggtcgtattcgaaccgttcccgtggaactactcggggttggaagcaatggcgtatagacgctggtgtcatagttcttaaatcttatatgacactagagaggagagccatccctcttgaagcatgcaataaacaaggttgcaccatgaaactagccagcacattgaaaaatgtggcttaagggcttaataccttcgggcgttttggtggacctaacgttatgcgtgattgctgatggtactaatgtactcatgttttccattacatgataaaaggtggattcccttttcagctatgggttatggaatgatcaactcatgcaccagagtgtactaggttagtgtacaaccctctttttgctacctttttctttgcatgaataaaggagatagttcctgtgaaattcaggttcattatcatttactgctttaatttacttttatccctcatctgagtgagacagatggtacgggttgttaataaaagtgtttgggatgcactgtctgatccctcgctgctggagcgatctgagtccagccgcatttgctgcttttagatataagcagatggaggactagcactccccttgagaacaaaatcgagtgcggcctagtcgtctaggatttccttagctataggtgatcgtgggctaatgcataccacagaaacatgcttcgtctttgagctaagtgtgaccgtgatggacacttgcctgtgttctttagcacagtgtgatttccttttagtaggtgatgatgaatgtagttttgaaactatcaccgaggtctgggaatataagcgttttggcaaacgatattgccttaatctgtgtacgacacaattgatagtgtactcaagagagtagggtctggcagcctgaatcttggatgaggtcccgagatgaaaacgggggggtaattaaccccagctatcggtacacggagatttccacgtttatgtaaatgtggcgcatttgctgtttttagatataaacagatattgcaggtagaaaacctgtgtggatacctattcttggagaaggagttcgctcggaagagtactatcttgaaacatttcaaaaggaaatttcattttaaggagagtaggtaagccattatacacctgtgaggagggtacaagataaagctactgctaaatttaatgctactggaagtgattcccagggctacatgcggtgccattgtacttatacctgaagggtgagtttggaaactcctacctattgaaatggtgagaagtgtttatttagtaagctcctaatcattatagggtgacgttgttttcgcaattttgttggtctttaatccttttcaaaattgcttttgcattttaatttatgtacgactcggggaaaagaaccactgtgtgtgtgtttggattcccaatgggtagactataccaatgttagtccccc

SEQ ID NO: 2743 - DNA, 76 bp, Spinach latent virus
  source 1..76: mol_type = other DNA
gtggtattgtgcattattattttaacgcacaacccggattaatcaggttttctgagtatatacccgttagtactca

SEQ ID NO: 2744 - DNA, 71 bp, Spinach latent virus
  source 1..71: mol_type = other DNA
gtattgtgcagtattattttacgcacgacccggattaatcatttttgtgagaatatacccgatagctctca

SEQ ID NO: 2745 - DNA, 113 bp, Olive latent virus 2 RNA 2
  source 1..113: mol_type = other DNA
gatatttcgcactcctagtgaatcttcctagtatatccgttgaaaaaacgagagtgcaacaacaaaaactacagagttctttttttttaaaaaaaaaaaaaaatcaaagagac

SEQ ID NO: 2746 - DNA, 80 bp, Citrus yellow vein clearing virus isolate CQ
  source 1..80: mol_type = other DNA
gaaaagcaaacattatcatacacaccccaaaaattgtgatcatcgtctctgcatcaacagctcagctaagaaccagagaa

SEQ ID NO: 2747 - DNA, 74 bp, Potato latent virus, complete genome
  source 1..74: mol_type = other DNA
tcggataaaccaaaccaacaatatttacacatactcaagttaaacatacactgttcaatcttgcgtacgttatt

SEQ ID NO: 2748 - DNA, 35 bp, Apple stem grooving virus
  source 1..35: mol_type = other DNA
aaatttaacaggcttaatttccgcgctttacgtca

SEQ ID NO: 2749 - DNA, 73 bp, Citrus leaf blotch virus, complete genome
  source 1..73: mol_type = other DNA
gaaaagcaacgaaagcaacctacacaacccaaaattaatatattgcaataactgttatcactcaatataagcc

SEQ ID NO: 2750 - DNA, 384 bp, Apple latent spherical virus segment 1
  source 1..384: mol_type = other DNA
tccgttttagagcttgtgagttgttattacgttttgttgtttgaatctctgttttgttactctgatttccttcacgtttgcaccttacactctctaccgataaacattatcatcttttattttgaattttatttgaaaaatttttatattttcaatgtcaatcactactcctgtagtgattcgctttgggagttttgactcccctgctgcggcacagattgccgatactaaggaggaggaaactcctctctctcgccttgcagctttaaatcgcaaggctcaaattgctgctcgttcaagagtagcagctgctgcggcacagtatgccgaagagcaggagacactagttctcactgctcaatccatgagggatgctctcccttt

SEQ ID NO: 2751 - DNA, 13 bp, Soybean latent spherical virus isolate ND1
  source 1..13: mol_type = other DNA
tttaatatttgca

SEQ ID NO: 2752 - DNA, 192 bp, Spinach latent virus
  source 1..192: mol_type = other DNA
tgttttatttataaaacctggttaagggtcctccgggatgtgctcagcacctagcctaagccaagtccatatgcccacctatgctgctccgggtggatgcttatacatgctatggatgcctacatttgaaataatgtagatgcctaatactctctctcagggagagagtttagatgcctccaaaggagatgc

SEQ ID NO: 2753 - DNA, 194 bp, Spinach latent virus
  source 1..194: mol_type = other DNA
tgtgttcctttcatggaacctagtgaggggccctccggggtgtgctcagcacctagcctaagctaagtccatatgcccacctacgctgctccgggtggatgcttatacatgctatggatgcctacatttgaaataatgtagatgcctaatactctctctcagggagagagtttagatgcctccaaaggagatgc

SEQ ID NO: 2754 - DNA, 258 bp, Olive latent virus 2 RNA 2
  source 1..258: mol_type = other DNA
tggtggctcgcctagagcggtgtgctggtttctacctaaggaaccaggagagtggagtgacttggtcatgacaagtcgagtagtactttaactacgagtcgtcgttgagacgccggtccccttccaaggggatcgagagggttttcccggtactttacccgggattcgaattgagctgtctttgacagagctcaaactcctcgctagatactctaacgagtgtcttgaggactctcctatggagagtcagtaaagacc

SEQ ID NO: 2755 - DNA, 36 bp, Citrus yellow vein clearing virus isolate CQ
  source 1..36: mol_type = other DNA
aacataaatattcaggctttcagtttccattttctg

SEQ ID NO: 2756 - DNA, 76 bp, Potato latent virus, complete genome
  source 1..76: mol_type = other DNA
ttgagttgtgcataaaacctaattaattttaagtgtgcaactataaaataaataaagttttaaatatttttccttt

SEQ ID NO: 2757 - DNA, 142 bp, Apple stem grooving virus
  source 1..142: mol_type = other DNA
gagtcgtgtgaaattccgcaaacttggtcgcggtcttgcaggttgacatgcctgcctttatacttaattaaagggttcccccggttttctgagcatttccgggttagtgtggtttttctagagtctagagtttgtccactct

SEQ ID NO: 2758 - DNA, 541 bp, Citrus leaf blotch virus, complete genome
  source 1..541: mol_type = other DNA
tcccgaattctggcatgggcggatgggtgggccaggactttacactcttaaagtataagtaaggggtaactcagccgcacgggtgaagattgtgcggagcctcatgaatctgaatccaagatgctaaaggggataccgcgatctgaggggtcatgggggttagcctgaagaacagaacactcattaagtatgtggtgacgcaggtcccgacaacccaaaaaggtgagctgaacctgatccaattggagcagtacaggtaaagttatatcctttctataaattgaaaggtagtttggacagatacatgtcattcaattggtgtggaacgttagtccaaatgaaacatttatgcttggatggaaagtcaagcaaacgttgtcaatgtgtacgtgaaattgtcaaataaacctcagcaatttctatgccctctttgtgctgagtattgtagagggtgaaggtgtgttttccattttatacgtcaataaaataaaatatgtattacttaaatacacatagggatgtcttttaagaacttttagac

SEQ ID NO: 2759 - DNA, 191 bp, Apple latent spherical virus segment 1
  source 1..191: mol_type = other DNA
taatttgtttggtctttcttccttcttttctttctttctttcttttgaactagtttgttctcgtgatccttggatccgttaaggtttcttgctggttcttccttaagatgagaacatgaaccagtctagttctttttgtttgctgtttattttatttcagtgtgtttgaaaagagtcggatagtccaatcc

SEQ ID NO: 2760 - DNA, 1569 bp, Soybean latent spherical virus isolate ND1
  source 1..1569: mol_type = other DNA
aatgagggcgcttcctttctttactagtttctttgtaaaagtaaactagtccttgggggcaggtagctccctccagcagcttggcacttgattagctttaatagtgttagctacccttcagcaaggtaggagctgcggtcgtattcgaaccgttcccgtggaactactcggggttggaagcaatggcgtatagacgctggtgtcatagttcttaaatcttatatgacactagagaggagagccatccctcttgaagcatgcaataaacaaggttgcaccatgaaactagccagcacattgaaaaatgtggcttaagggcttaataccttcgggcgttttggtggacctaacgttatgcgtgattgctgatggtactaatgtactcatgttttccattacatgataaaaggtggattcccttttcagctatgggttatggaatgatcaactcatgcaccagagtgtactaggttagtgtacaaccctctttttgctacctttttctttgcatgaataaaggagatagttcctgtgaaattcaggttcattatcatttactgctttaatttacttttatccctcatctgagtgagacagatggtacgggttgttaataaaagtgtttgggatgcactgtctgatccctcgctgctggagcgatctgagtccagccgcatttgctgcttttagatataagcagatggaggactagcactccccttgagaacaaaatcgagtgcggcctagtcgtctaggatttccttagctataggtgatcgtgggctaatgcataccacagaaacatgcttcgtctttgagctaagtgtgaccgtgatggacacttgcctgtgttctttagcacagtgtgatttccttttagtaggtgatgatgaatgtagttttgaaactatcaccgaggtctgggaatataagcgttttggcaaacgatattgccttaatctgtgtacgacacaattgatagtgtactcaagagagtagggtctggcagcctgaatcttggatgaggtcccgagatgaaaacgggggggtaattaaccccagctatcggtacacggagatttccacgtttatgtaaatgtggcgcatttgctgtttttagatataaacagatattgcaggtagaaaacctgtgtggatacctattcttggagaaggagttcgctcggaagagtactatcttgaaacatttcaaaaggaaatttcattttaaggagagtaggtaagccattatacacctgtgaggagggtacaagataaagctactgctaaatttaatgctactggaagtgattcccagggctacatgcggtgccattgtacttatacctgaagggtgagtttggaaactcctacctattgaaatggtgagaagtgtttatttagtaagctcctaatcattatagggtgacgttgttttcgcaattttgttggtctttaatccttttcaaaattgcttttgcattttaatttatgtacgactcggggaaaagaaccactgtgtgtgtgtttggattcccaatgggtagactataccaatgttagtccccc

SEQ ID NO: 2761 - protein, 1056 aa, Spinach latent virus
MDTIVQMKVLCYESMILLMIPSDVNAPRPETAIGRLISDAAVSGVLRQCDFTAAEASQCFVPIITGRSECIETRFSGREIQFRNFSYSSQSFAAAHRVCEADYIYSRFQTRNTTIIDIGGNFCTHSKMGRDNVHSCCPILDVRDGARYTDRFMSVAGALETQPDRELRLNYCSNKFEDCDVSAPWAMAIHSISDIPITSVVKHCFRRGVKKLIASVMMDPMMLVASQGFMPRLNVQWEIEPDEENKGSRRISFHFVDAPGLSYTHNYDVLMQYMTCNQVIISGKAAYRVERVADLSGVFIVEINPGGNCWNERLDLVPMRDVSCAWMTSLKRKTLVRVAIPQYIHSWEVKYVIADTDFVRRVAEVSFRQYKPETPLQDLVKSVATMISSASNHCIINGVTMQTGTPLAIEDYVPMAVTFVAFAKSRYDSIKEGMKMVRQRGTNIADPNDHYDYEKDGSDVKSFSNHIIPMKNTIKSLFFPMKVKMNDNSMLIYSQGILSTVVDEIKTLFGWDVWDTDDAVIQSLPSFYKMEDVFQVTSDHYCLSHTLSVDWWLEGLYDSYHDMRVAHKKKLDEEESRKTKVENALLKIAEVLEKPDVSDGLKALSELPIISSLLEKKSEEIVTKPQCRDTEKPHINPYADAIKEAQAYYEELEVVNTRNLRGVGDYLFWRKKSNYASVWGADESRVVLEPMARKFYSRDRNVSIPEYERGMTVDGFVSIKWVDGNITEDTWKCLSKYAVVLLDSSCVFDAGSRIMPGLKKALVMDANFKIVIEDGVAGCGKTTSLLKQAKPDSDLLLAANRETANDAKASGVIPKALEYRVRTVDSYLMLRTWFTAERLLVDECFLVHAGLVYAAATLARVKEVIAFGDTKQIPFVSRIPTVKLRHASVVGTLKPRTITYRCPRDVTAVLSEKFYGTKVKTFNLVKQSLELKNIDSSTEIPVEKDTLYIAHTQADKHALMRLPGMNGIEVLTTHEAQGKTRDHVILVRLSKTTNLLYSGKMPDAGGSHNLVGLSRHKKSLRYFSVFADDPDDQIATGIRWSKTLDEQELAAYRAAG

SEQ ID NO: 2762 - protein, 797 aa, Spinach latent virus
MDSYHFLSQLCDLNVLTHALYVNQVFEIVDQSTTSYMQMWLYSRVIVPVLKYHLSGDIILDKLHDVFLGTFRSMMVPMIMLNRLSFVVKMTTMNHHRKAYLPLEEREKIHAATFLGHDHWASVTSGSSFYDDLEILADETVNDDLHFDKESSMPDEYQIMWNDGTIDSVWSSQFECEEPPKPKFIPRPSDKVCDPVVIQDAVNDIFPFHHEMDDRYFQTLVETQDISLEVSKCWIDASNFRDFVKGPNSYVEPVFQTGATSKRVHTQREALLAVKKRNMNIPELQSTFDLDAEVNTCFKRFLTHVVDLPRLKRLQPMTGVEVEYFNQYLLGKNPPVKEYQGPLTLTALDKYMHMVKTIVKPVEDNSLKHERPLCATITYHKKGIVMQASPRFLSAMSRLVYVLKSKIHIPSGKWHQLFTLDAGKSDAVKWFKEVDFSKFDKSQGELHHKVQEKIFNALKLPPGFVEMWFSAHERSHIVDREAGIGFSVDYQRRTGDANTYLGNTLVTLICLARVYDLCNPNITFVIASGDDSLIGSVEELPRGPGEFIYNPVNFEAKFPHNQPFIWLKVLVSVDLEDGGREVIAVPNPAKLLIGMGRRDCQYQALDDLYQSWLDVIYYFRDARVCEKVADLCAYRQTRRSSMYLLSALLSLPSCFANKKKFKWLCYRLREQGCLKKDIYPVAKPISAHNIRKEDSNGCDVNQGTDDSFSRKKNRGCWEYVPKMLQTDVSVPVTDKSFHSNRGSSVSPTDCGDGGCSRSASSIGSKNTKPRHRFRAAGVHQPSGRDPDRIPPNHRRSA

SEQ ID NO: 2763 - protein, 787 aa, Olive latent virus 2 RNA 2
MAGVLYDEEYVPQEPDYLYCPYEWEGEDPTQCDANVPSVSYLVEAVKKSFTEGNHDMLISCESYHAECCEGPLMNKGLTLSTYFMSYPGISLPAFGGGVIHVTSARVCMQAFYAVTPGRCSCSCGTQFIYRAKGGTGLTFDATNTISSAFKFEDGKVKWLTEDLGLALLAGCFLKYVPIPHEIEIKIERKVEPVSALDFWEPEGLISDVHFVHPQERALAPEPPMDVEMVRLVRTELFEHFNPTLLLNARSDFSGEKLKEVELPRAQSEPLVPRVCLPRGDDALIDQFFIDKAPEHFNREPATDQWQVESDDFTVDFPTQVRLRERDEDWFRRKPDFAVSSIRTGLEMPRIATKKEMLMAFSKRNVGAPQMVEVPQEIHVKRLADRFFRTFLKEGGWDKGDGHYWDDFFHRKGRKVFSLENCYDDPLSSYLVMLKSAGKFSLDLNFPVRSVPQTITYHEKWVTEVFSPMFLQVMARFFSRLQDWVVVPAGPMADFSRVWPSFEGKCLTEIDLSKFDKSQGKLLHDVQREIFLRLGFPPIWCDWWFKFHESSYLNDKNLGIAFSVDYQRRTGNTATYFGNTLVTMIMMAEVYELDSLPFCGLFSGDDNLIVTDRPLEGRVSLFPNMFNMEAKVMRPGQNYMCSKYLCTVDGRVTPVPDPFKLLKKAGASCPLEHLDDFYESFLDYTKYLVRDEVRTLIPRLMAHRYQVSMDEAGVALDQIMSWRKSKTQFFKHFQYRKPIKDSLEAVKSDFLSAFGKVDDRIRVWRGRRTNHKKEVDALKVPLVSFRE

SEQ ID NO: 2764 - protein, 1649 aa, Citrus yellow vein clearing virus isolate CQ
MATIRGAIERITDTTVRTTLQEEACRQIRAELKNVEHINRYAIQPDAADALEHLGIGSNPFSVALHTHGACKAIENQLLYVVGTLLPKERVTMLFLKKSKLNIMKRCPKFQDIFLNQHIEPRDVSRYCDFNVQSTSTSIPTRTAYISDTLHFMDRRDLVRLFLNSPNLETLYATIVLPVEAAYKQPSRYPEIYQINYDFDGFQYIPGGHGGGAYHHEFEQLQWLDTGHIHWRGPDCKEIRMTITAQMLESLGANHLFCFKRGKLLTPRVRTFGRDTQVLLPKIFRPADKNFNRAIPLTLANKLLLYAKSINTVTFRDVVAKTRQLMKDKELETYTGNDLLHMANYFFAVGALSGVNSYDQLLGLSAWEACTVRIKNTITNLWEKIAGKKEFGKLLEALEWETFTYSRQVTEFTVTGLPALLPLPDISDQEEIFAQQDELDKITAGATKIRTIDIMRGQANRANPKTPINSTPAQGPQLPDTPDPIDQAASKDLVTKLQKNKRIYIQDDGPEYLMGHMAEVPAWYLEQDDTTTRLKNRCAWFFGPPTYRYGHNDIEYTTIEYYPWVERIGAIFGKYNTCLAQTYDAGARIGYHADDEDCYDPDVTVVTINLTGNATFLLKTPTGTRTWKLKPGDFIIMKPGAQRCTKHAIRDCTTNRTSLTFRWQARTCPTNLRKITNLPKATNQPQTTEWRPVTKPRPSTTASSDTQTPLVIDQERGYTTTSDVTPTIRLPAENGNNTGAGPSSALTLADLNDNQAPTTNKGKEKLEEMVETGPTIMERFLNTVQEPTQDLWDSASESAASYLAEGLGISAIQALPWAPHLELINALGFQGTERQYGPDNCLIWPITHYRELPRSNNVEAPPEVLELLDCINRYPTDVPMLKTRAAAFGSDVKNLRIGALVKNQDKQWRASLALLCEENEHLLPTTVIHGAGGSGKSHLLQQWVASTERGNVVTILPTIELLRDWQNKCPHAPKETFKTFEKALIQNSAPVVIMDDYSKLPPGYIEAYVSLKGQCKLLILTGDPRQSHYHEENPEALISTLDPATDYFGKFCAYNINATHRNAKTFANALGVYSEKEIPTTITCSSYQKSGWPTLVPSILKRTALNDMGQRSLTYAGCQGLTTPKVQIVLDNATPLCSDKVMYTALSRAVDQIHFFNTGPNHTDYWEKMNATPFLKTFIDHTREETFAEHQPAEPTVREYAPATHFPPANENLALEPWVEPLTDKHSRELFHSALGHSNCVQTENTVVQLFPHQQAKDETLFWKTIDARIKITTPEENIRACSIATDIGDILFLNYKEAMGLPQDPIPFEQALWDSCQAEVQLTYLSKPLAALANAAQRQDPDFDSNKIQLFLKSQWVKKVEKMGCLRIKPGQTIASFMQQTVMLYGTMARYMRRIRTSLCPPEIMINCETNPNQIGTWVREYWNFNTQSHENDFEAFDQSQDANMLQFELIKAKYHSIPEEIIAGYRHLKCNAHIFLGTISIMRLSGEGPTFDANTECSIAYNHTRYFVPKGTAQLYAGDDSACASPLSEKPSFQHISPELSLKSKAKIRTQQKGDFATFCGWLITPKGLIKNPTQLYASWLLAKHNKDLADVARNYALDLRIAYQLKDELYELLSPEELDHHQLLVREMIKHKMGHLLNLPEGFKTN

SEQ ID NO: 2765 - protein, 1780 aa, Potato latent virus, complete genome
MALTYRSPLEDIVGAFEPSVQTAIANTAANHYKQLEEEKGILFNYALPPEAKQRLIGAGIYLSPFSAVPHSHPVCKILENHLLYVELPSRLDNSFMFVGIKNFKLDLLKRRHANLSMIQTINRYVCSLDKIRYGSNFVVRSSASYPELCRRKGELDGAVLRELVPELMIKSAKNLFLHDELHYWTHRDLITFLEVLKPDKLLGTLVYPPELLKGAKKSLNSWCYTYRVDKDKLFFYPDGVHSEGYEQPLSGGYLLETSRITTRDGEVYCVDVVCSKFAHHLIAITRGDLIVPTQRSFAPFEAITSKGLNNLVRGKVECFPVCASVVSKLYRYLRTLKKPDEQSAMAKLSQLQANPTGEEIHFIQGFAKLVINTNKIDSLINCDSIKVFMGKLFGPLPNWLTKRLRSVQEVSLDEFVHYFEPYVVNVPTKHVNYGFEFNYVMEDFRYEQGENDLVDMLDNFDGSTKMSTSLCMMTPYVGLAPLTTRRKFLCHIEENSIFRVVSRNIFCSYTNSYKVAVSTEGVVRILEIYSKVSVDLLGAYLGKLLKKTEFIERVRSRVKAIAIKHLKYTWQQVGLAWFTSGRRGYTKYIDCSPYTMNTFKELKERWGVIVRELSKQQDNAEAAKNIPEQEIQTTSKPSCVEKRNYFSNTLMTSFAASGVKGKEQVSSEIAKGRGERSELRATKLMGSCSTLGKVAHIASRKGSMGVLECVARVIKLDFQTALKFLRVKGVWMQEYESIGELEEEQIQSPAYDFCAAIAMTFNVEIELTFPGSELVYHFAASSTVSCIRLSIWEGVVTLMRAENDCVITACAQALAREPEDVVKVLKDRLEESILEEIWNGEGVPFERMYLFFEALDIQAHCNRDGAQLVLNGGGKLARCFVIKEDHIEFAGEKKVSRVLELQDARTSSKADPELVKEFQKAGTVVEYVAVQSRAQVLAKSLVDATTGVCSSTIFNDCESLERSFRFTESELARNVCCVIGTFGAGKSTLFKDMMRQCLGKGVHYASPRKVLANELKASLGLAKGKRNRKVGTENWNVHTFESFLKKAKNVAEGELVIIDEIQLYPPGYLDLLLYLIPEFTSVFAVGDPCQSDYDNEKDRHVFLGVETDVCRLLSGREYEFNVLSRRFHNLGFESRLPCRFKFPAGAVKEEYLFVNSMTEANELDSAYKSVYLVSSHLEKKIVEYQSDVKTPNVLTFGESTGCTFKYGCILITQVSSACSERRWITALSRFSHNLCFINATGVPIENVAKSYKDRSLGKFLCGTAVEGDIKSMAYGTPIFKEQFIAGVGRDEGVKEDKVTGDPWLKTMLDLMQLPDVEEAEMMQEEMQEEWFKTHLPQEEIEGVRCRWIHKMLAKEARECRMGSIVSDQFPDDHSKQEGKQITNAAERFEAIYPRHRANDTVTFIMAVKKRLRFSRPSVEKAKLTQAECYGTYLLKNFLDVIKLKPAHDEAMMIRAKEDFEQKKVSKSAATIENHSGRSCRDWCIDIGQIFSKSQICTKWDNRMRVAKAAQTIVCFQHAVLCRFAPYMRYIEMKLKEVLPARFYIHSGKGLDELNSWVKEGRFEGVCTESDYEAFDASQDQYIVAFELALMRYLRLPNDLIEDYKYIKTHLGSKLGNFAIMRFSGEASTFLFNTMANMLFTFMRYELHGDEYICFAGDDMCSSKRLRIKKTHESFLGKLKLKAKVQHTEKPTFCGWNLCADGIYKKPQLVFERMCIAKELNNLHNCIDNYAIEVAFAYKLGELAVNRMDEEELGAFYNCVRLITKFRHLLKSNVVEVFKRK

SEQ ID NO: 2766 - protein, 2105 aa, Apple stem grooving virus
MAFTYRNPLEIAINKLPSKQSDQLLSLTTDEIEKTLEVTNRFFSFSITPEDQELLTKHGLTLAPIGFKSHSHPISKMIENHLLYICVPSLLSSFKSVAFFSLRENKVDSFLKMHSVFSHGKIKSLGMYNAIIDGKDKYRYGDVEFSSFRDRVIGLRDQCLTRNKFPKVLFLHDELHFLSPFDMAFLFETIPEIDRVVATTVFPIELLFGDKVSKEPRVYTYKVHGSSFSFYPDGVASECYEQNLANSKWPFTCSGIQWANRKIRVTKLQSLFAHHVFSFDRGRACNEFNHFDKPSCLLAEEMRLLTKRFDKAVINRSTVSSLSTYMACLKTANAASAVAKLRQLEKRDLYPDELNFVYSFGEHFKNFGMRDDFDVSVLQWVKDKFCQVMPHFIAASFFEPTEFHLNMRKLLNDLATKGIEVPLSVIILDKVNFIETRFHARMFDIAQAIGVNLDLLGKRFDYEAESEEYFSENGYIFMPSKSNPERNWILNSGSLKIDYSRLVRARRFRLRRDFLDPISKGKSPRKQLFLESTGNIKSNPNAEKNSESGEIKIEGSAENDQPHEVSHTSMETEDGQGFEGSIPVDLINCFEPEEIKLPKRRRKNDCVFKAISAHLGIDSQDLLNFLVNEDISDELLDCIEEDKGLSHEMIEEVLITKGLSMVYTSDFKEMAVLNRKYGVNGKMYCTIKGNHCELSSKECFIRLLKEGGEAQMSNENLNADSLFDLGRFVHNRDRAVKLAKSMARGTTGLLNEFDLEFCKNMVTLSELFPENFSSVVGLRLGFAGSGKTHKVLQWINYTPSVKRMFISPRRMLADEVEPQLKGTACQVHTWETALKKIDGTFMEVFVDEIGLYPPGYLTLLQMCAFRKIVKGQSENFLKGKLLELSKTCLNIRCFGDPLQLRYYSAEDTNLLDKTHDIDLMIKTIKHKYLFQGYRFGQWFQELVNMPTRVDESKFSRKFFADISSVKTEDYGLILVAKREDKGVFAGRVPVATVSESQGMTISKRVLICLDQNLFAGGANAAIVAITRSKVGFDFILKGNSLKEVQRMAQKTIWQFIIEGKSIPMERIVNMNPGASFYESPLDVGNSSIQDKASNDLFIMPFINLAEEEVDPEEVVGDVIQPVEWFKCHVPVFDTDPTLAEIFDKVAAKEKREFQSVLGLSNQFLDMEKNGCKIDILPFARQNVFPHHQASDDVTFWAGVQKRIRKSNWRREKSKFEEFESQGKELLQEFISMLPFEFKVNIKEIEDGEKSFLEKRKLKSEKMWANHSERSDIDWKLDHAFLFMKSQYCTKEGKMFTEAKAGQTLACFQHIVLFRFGPMLRAIESAFLRSCGDSYYIHSGKNFFCLDSFVTKNASVFDGFSIESDYTAFDSSQDHVILAFEMALLQYLGVSKEFQLDYLRLKLTLGCRLGSLAIMRFTGEFCTFLFNTFANMLFTQLKYKIDPRRHRILFAGDDMCSLSSLKRRRGERATRLMKSFSLTAVEEVRKFPMFCGWYLSPYGIIKSPKLLWARIKMMSERQLLKECVDNYLFEAIFAYRLGERLYTILKEEDFEYHYLVIRFFVRNSKLLTGLSKSLIFEIGEGIGSKWLSSTSTASSRRSNLQTSKLMLSRPQSFTRMQPFSNQTCLIASKGLNQTSRFPLDLVTASSCLISNCLMTPKLIQSGRKATSTNTYTMESSWLGSKQCCQTLEAWKGESLYMMEPAWIRKEATFARIFSSLSLTVATLVSGQSTVCLPQTQIWPKGLDFVWTLIVHNMNRTLSCLLLTLELHTDASTLQGFWKPKLAIQDGLHRQSAAVKHLNSMRKSRWPSWIADPRCFWKKVHQTCTLKRDCSEVTRLEGHAQFPLKGGQTQGCKKREDLGPSRLELKDLEKMSLEDVLQQARRHRVGVYLWKTHIDPAKELLTVPPPEGFKEGESFEGKELYLLLCNHYCKYLFGNIAVFGSSDKTQFPAVGFDTPPVHYNLTTTPKEGETDEGRKARAGSSGEKTKIWRIDLSNVVPELKTFAATSRQNSLNECTFRKLCEPFADLAREFLHERWSKGLATNIYKKWPKAFEKSPWVAFDFATGLKMNRLTPDEKQVIDRMTKRLFRTEGQKGVFEAGSESNLELEG

SEQ ID NO: 2767 - protein, 1962 aa, Citrus leaf blotch virus, complete genome
MALMSNKTAIESILGNFEKKHVDAIYNAAAQTILSHSEFRNKHFAYSLNSYQKKIASKVGIELYPNGYLPHSHPLSKIFENHLLFDVLPGVVNTSRLVMCSIKESKVLVFKGIRDKSRRQVSDLNALNSLNNSHTSFINRLVASKDVSRYTEEADAFFQSKKGSPELFSRNFIKSLENKEAVFFHDEVHHWTKAQMFSFLKSTKVKRFIFTVVYPPEILKKFANSQNPKVYDFKVDKGRLFFFPDGVKTEAYEQKLNMEWLFSASHLRSGDCVWTVTRHKSIYAHHLFEISIGELVTDSKLFFSDYNSIDMSKIFLDRFRSYEVFPISIEHLYKVYSYLLCLKKPDLESGLAKLRQIIGDDVEIKEFLFFEQFCKRLIERQTSWGLFGHSFFEKLTDMALSSLPNSIARIFPQWKKKNTFEFLFSLGTLVVDVERKVCFEHVLEEWGFEVVITDENAYLDPLSIFAINENFNEDRVDDGYLERIRLPFWNLNDYDLKRKRVNAYNILSYRFEEERKIESAQKGPNKMLQIEWYGIKEFKVDPFISNSITEFTLLEALLGKRIDPKKYSYSKQACTLSNYLTFLCAEGLDGFNLEEHLERRLKAAGHDVSDDEEEELTSAEQAGPIKILADPLGFMKECLEEIPIETEPSLEERGQFSTDYHSEKFEINYNDIFNPHNCMNTHGDEIPTPSDGNCFFSAFTETFEVERPDTLRSDFSDWLMEFNGGSYASLAEMIRPNGVFMEAELIYLFCVFRGVTLIIHDRTHEKENVYAVHRGFEEGHMVHRGNHFVGIETYNISTLTSDPLLGDIPCGFSEEITKFHFRPDHFNCAQFRGRKAAFITKVDADYGHNGMVYPHNSWVPSLEEIIQICGQGDDFNCALINFYEANSSLGFHRDNERVYNDDPILTVCTFGEGRFTIEFKDQVTSFLMTAGSFFLMPKGFQKKARHSVSNEMSRVSITFRKHVRRLNGSPIAIREENYKNTCLINAFSKAMKRSKQAIIAKLKTVNSPFWSRYLSEGNGGSIEDCQSACEALDVTVDLNVNGKCVVLGKGALRISMALRNNHFSVINAAQLMERTFVSHLLEKGNVNVLEGFDAMLSGDVGAAGVNKIQFAANFEFARILANSFLNMTTGICLGKALDNGEKYFLHILKDRVKQIGIDVTMVCGFAGSGKSRKLQSWLHSRKKGNFCVVSPRTNLAADWAFKLELEPNEQRKVSTFEKFIKTDKSKLDLIVIDELTLFPNGYLDLLVYELADVNRHCQIILLFDPLQARYHNKMDESILTFEHDVDRLIGGQNIEYIYSTHRMSRYFNRFFDVPCFNQADRTEEQRLWIFDDVYSIPSICSDRQEPCDVLLVESDLEKKAFSPIINVMTFGESQGLTFNHVCILLSESSAASNEFRWMVALTRARTRFSLCSTFLGGIEEFKVKRKESLITSILQGEKITFNRLNLMLKCNLIRREKENGCRDEVDREERLEGDPFLKPFIFLGQRVEKDEDEVEEVKIREPTCQTHLYITEPNFGLCYNFDFIREKEQREYREDMLVTNQFCDSYDKVHINGKRETPGPLRFKAIYPKHSADDDMTFWMAVRKRLVFREEEENYQRLSRAHLVGGLLYTNFKKKMGLEFTFDQGLLEESINAFEKKKLEKSCGTIKSHSIRSDIDWALNDVFLFMKSQLCTKYEKQFVDAKAGQTLACFQHLILVQFAPWCRYLETQIRNQLPEEIYIHSNKNFDDLNAWVKKFFQRDICVESDYEAFDASQDEYILSFEIHLMKDAHFPQKIIDAYIDLKCKLGCKLGHFSIMRFTGEFCTFLFNTLANMAFTMCRYEWRRGQPIAFAGDDMCALNNLAVCHDFDDLFELISLKAKVERTETPMFCGWRLTPYGIVKEPELVYNRFQVAIEEGKVLECLENYAIEVSYAYSLSERLYEVLKSERQVQYHQAVVRFIVTHIDKLKTKVRDLFLEQSSDEDI

SEQ ID NO: 2768 - protein, 709 aa, Apple latent spherical virus segment 1
GPEQMYIPTARSESFGSVCLLGKWTGPKPYFLENSSLTPSLIHDCIDIDMTTEPAILSKKDPRLQYTNNKDFDPFLSGMGKYAVEAHSFDEDEELFEDALDRVFSEIPMFTCEDLSNDQVCNGIEDDDYAEGLVMQTAEGYPFCTMRPPGVTGKTWLFAGSPGDWHIVPNSLLANELNVKELNLSKNIFEPVIGIDFPKDEKVDSSKVYIKQKTRLFTILPVDYNILVRKYFLSFVSQLMALHNEVPTKVGIDPISNEWSILCHSLHSKGTNWFNGDYSRFDGITPRNVLQGIVKRISRRYANKSSFAITDPTLSINGDLARSLLMDMCSTRYGLTNGDLWYVTSGIPSGFPLTVIVNSLVNSFFVHFAYMKLHSSEVHKALYPLYSFRTLVSYAVYGDDNLISVHDTIKDTFNLVTISNLLLEHGVTLKNGADKNEEILSPFYPIEKVDFLKRRFTTLQGHIVAPLNTVNITERLHWVRKGLGDADATLENCKSALFEALFHGELYYNDLRGKIEKACKVKGLPLIVPDYQDALSLFLTGGSYAKAIQAIAMNLPDRISLYKSEFYSVQIYPQIFYVTNERNVTLQKLLETTTLRNICYVSRNYESRSSSRGLFTLKGEGWTPAALKARLSVYKAMAKPVYFVDEANDGLAMFYCLDYAFRVCGLTRSQIAKILNAVFGGNPEVCQRIFQFFSQVEPTNKYIPPNQRR

SEQ ID NO: 2769 - protein, 2195 aa, Soybean latent spherical virus isolate ND1
MSFHCPSSTCLGYTQSFSRRDMREQGDRCPHAMCGALLVKKVPTLSPQGARPVVSKTTVVVPPQATEEVLYYGCAPRPAFLEAVLAAPKLKMAPPVVDAMEVAYLRGVAAMEAEEKKLLRKEKAAVVARAKARRAARKAAKKQVAEMKATVALKLATRQKTARLSAAKRAMKAKRKAAKEAARLALEERRAAGLTRKSAFRRSLKKKATKMAGRKVPKTSTSTFPKVESFSCFPSSPLPAFIREEQPWVAVNTPCPHPEGFDLAVDPAFVAPIVGPIVSVPFMAPVVKAFNSLVEILAAINYEAAVDLRAYILEIASYENFFALRRIFVGKALSWMALILPLYPYAGIFDTYLPLDMVEDKNCDAYLASLQQTAVMVLEVTQGPMDAHSIFDIVRSVGSKVASIKDKVVGCIVEKSAALLDTVIDTAKGMFFGVLGPYLARAQKIGEEIKKFWDNCVEWATKLWQGAHIALQALGIYAVWAIVAMVLVGVMYILETILICLGVMSGHGVLVVALTGAVMTFLGFTVFQMGREYIHFLTALRQIIFLAVIPQGGLTQVNIMDSSVDVTEPHSLLDTAMAPVHFLETVASGLTFFSSTSVTVLGKLGNSLEGIRKGFNCLRDFTSVLLEQFGNAFEYISGKRTSFFRDLACAVKVDIARWTQDARETIEYFEISGSLDRYEYYRARELIYQGQDLIDTANKARSSHTSVKFLRTIGKLVEELKEIRAKCARSLKFPGWRRQPFWVYCFGESQCGKSTLANYLMPLLMSHMGWDPQDVYSKDPVDGYWSGYYQQKGLKINDLSAVNSKDVAPLEQQLIPLISTEEKMVSSAEIEGKGMQFASEIVVSSSNFNDAPTGAEILDADAYRQRRKVLMRCRRAAEWVHNADGTRTEKLDAEGKIVYKPYDPSNALSCTEVQWIHPVSFTALPGPCGQWHLAEFTIPMVKEAMDAHFLQEETKMASWKSSLGMKSQTARKMGSYLQDMIKGIGNFVTLKGAKDSDPRYLLVAVDGKCYALDQQGKATPYEDCDVVEEIERLTLLQYRSYFADLVMEHADNTYYQDSFHSSTVRDFLLALMKDGSTVLSVDSLGSSTQDIHKELWAELGLSEKIFLRVSQIARNQLRDAPHFKEDVAHNFLETMRHLRDAIVDRKEQILLFFAAVALVGLFSWGFLSLIKQFACGSLGFGAGIALREQIAHSSVMSSGSVTSAFVARNMPVVWGKAARYATAHSSKEEVGANFDYFEDASAHLLARVVGSSGQSETCLLFGHQAIALCAHQLRLFPDNDRVTIHYFSKERRPVCFSFTWHYINAIEWPDCEVIVYRDAQLTPLPVYSDDNYLCGEQTLPTVLTITGLSIKKKKFFDDSTLCPSEKILDGEMPIVRSWKDTASLRTQVQTILSETHRRDINRYYTSSYPSGKHDSGGIITAVINGKRKVIGMHCAGAQNGKIYVSTIGLLPTRNINDAHSAADYFVPSIGREEKGFCKIGWIADPSKRPHAATKTALAPVPKELALPLPEGVSVKIPSILSAADPRLRDEVNPEFKDYDPLRVGMDKFANPMDPLDDEVLQRVCEDIYETWYDCLPILDDEKVFLQKTSLEVALNGIPGEACYEAMRLDTSEGYPFVLERKPGESGKLSYVHIDENGVRSLIPGTSVFRDYHELSASILTQVPVLNCIECPKDELLKPSKVLEKPGTRLFDVLPFTHNILLREYFLNFCVFLQQNRVHLPCSVGVNPYSREWTWLFDRLAAKSDKALNCDYSKFDGLISHQVYMHMVATINRLFRDGEEANCARKNLFLMFTSRRSICYDQVYMVKGGMPSGCALTVIINSILNEILVRYVYRITVPMPAKNYFNKYVELVVYGDDNLIAIHDDVVSFFDGPIIKEKLAEVGVTITDGTDKSSPTLLRKPLESLDFLKRGFRKIEGGMYSCPLDKGSLYSRLYYSAGGKGGLFQLDILHDNVKSFLEELTHHADHYEEFQRVRSFYIKRIPSWSATLPTYATCLNMMEGQRNSATPWQPHKFIETRPSGCETKMMAGQDNHAQKICVTERIIICGEKYTPPILETSFVVSIDNPLYIGERGEYVKTEFGSGMGRLPTDAWIKAFSSPKKHPQLFEAYKMGATIYFRSCMPYLNAWCAVCKFALAHGIDQSSIIAMYESCKPRGAGDIAPLVAVKAYTKFVNRPVFKFKETVHKEVLEAHNSVRVA

SEQ ID NO: 2770 - DNA, 3171 bp, Spinach latent virus
  source 1..3171: mol_type = other DNA
atggatacaattgttcaaatgaaagtattgtgttacgagtcgatgatattattaatgataccttcagacgtaaacgcaccaaggccggaaactgccattggtaggttgatttccgatgccgctgtttcaggtgttttgcgacaatgcgatttcactgcagcggaagcctctcaatgttttgttccaattatcaccggaagatcagaatgcattgagacgcgattttctggaagagaaatacagtttcgcaatttttcgtattcctcacaatcattcgctgctgcgcatcgagtgtgtgaagcggattatatttatagtcgattccagacgagaaataccacgatcattgatattggaggaaatttttgcacccatagtaaaatgggtagagataatgttcattcatgttgcccgatattggacgttcgtgatggagctcggtatactgacaggttcatgtctgtggcgggggctttggaaacccagcctgaccgtgagctcagactgaactattgttccaataaatttgaagattgtgatgtttccgcaccatgggcgatggcgattcactcgatttcagatataccgatcacaagtgttgttaagcattgtttccgcagaggggtcaagaaattgatagcctctgtgatgatggatcccatgatgcttgttgcttctcaaggttttatgcccagattgaatgttcaatgggaaattgaacctgatgaggagaacaaaggttcccggcgaatttcttttcatttcgtcgatgctcctggattgtcatatactcataactatgacgtgcttatgcagtacatgacttgtaatcaagtcataatcagtgggaaagccgcgtatcgagttgagcgcgttgcagatctgtctggtgtttttattgttgagattaaccctggcggcaactgctggaatgaaagactggatctagttcccatgcgagatgtttcatgcgcgtggatgacttcgttaaaacgtaagaccttagtgcgggttgccatcccgcaatatattcattcatgggaagttaagtatgtgattgccgacactgattttgttagaagagttgctgaagtgtcgttccgtcagtataaaccagaaacaccattacaggatttggtgaaatctgttgcgacgatgatttcctctgcttctaaccattgcattatcaatggtgtcaccatgcaaactggtacaccgttggccattgaggactatgtcccaatggcggtgacttttgttgccttcgctaaatcaagatatgattcgataaaggaaggcatgaaaatggttaggcagagaggtactaatatcgcggatcctaatgatcattatgattatgagaaagatggatcggatgttaagagtttttcaaatcacataattcccatgaagaataccatcaagtctctgtttttccccatgaaagtgaagatgaatgataattctatgctcatttatagtcaaggaatcttgtcaactgttgttgatgagataaaaacactttttggatgggatgtttgggacactgacgatgcggtaatacagtctctgccctctttttataagatggaggatgtttttcaagttacgtctgaccactattgtttatcacatacattatctgtggattggtggttggagggactgtatgattcttaccatgacatgcgtgttgcgcataaaaagaaacttgatgaagaagaatctcggaagaccaaggtcgagaatgccttattgaaaattgctgaggttttggagaaacctgatgttagcgatggtcttaaagctctttcagaattgcccataatatcatcattattggagaagaagagcgaagaaatcgttacaaaacctcaatgcagggatactgaaaaaccccatattaatccctatgctgatgcaatcaaagaggcgcaggcctattacgaagagcttgaggtcgtaaatactcgcaatttgagaggtgttggtgattacctcttttggcgaaagaagtcgaactatgccagcgtttggggcgctgatgaatcgagagtggttcttgaacctatggcaaggaagttttactctcgagatagaaatgtttccatacccgagtatgagcgaggtatgacggttgatggtttcgtctccattaaatgggtggacggaaacattactgaggacacgtggaagtgtctttccaaatacgcagttgttttgctcgactcttcttgcgtgtttgatgccggttcacgtattatgccaggtctgaaaaaggcattggtaatggatgcaaatttcaaaatcgtgatcgaggatggtgtggcaggatgtgggaaaacaacatctctcctcaagcaagctaagccggattcggatttgttgttagctgccaaccgtgagactgcaaatgacgcaaaagccagcggcgttattcctaaagcgcttgaataccgagtgagaactgtggattcttacttgatgttgagaacgtggttcacagccgagagattgctcgttgatgaatgtttcttggtccatgctggcttggtctatgcagctgccaccttggcacgagtgaaggaagtaatagcttttggtgatacaaagcagattccattcgtgtctcgtataccaactgtcaaactcagacacgcgtctgttgttgggacgttgaagccaagaacaattacctacagatgccctagggacgtgacggcagtccttagtgagaaattttatggtactaaggttaagacgtttaatcttgttaaacagtctttggaattgaaaaacatagattctagtaccgaaatacctgtagaaaaggatacgctatatatagcgcatacccaagctgataaacatgctttgatgcgtttacctgggatgaatggtatagaagtgttaactactcatgaagcccaagggaaaacaagagaccatgtgatacttgtgcgtttaagtaaaactaccaatttattatattccgggaaaatgcccgatgctggtggttcgcacaatcttgttggtctgtcccggcataagaaatctttgagatattttagtgtctttgccgatgatccagacgatcaaattgcgactggaattcgctggtccaaaacattggatgagcaagagttagcagcttatagagctgctggttag

SEQ ID NO: 2771 - DNA, 2394 bp, Spinach latent virus
  source 1..2394: mol_type = other DNA
atggattcttaccacttcttatctcagttgtgtgacttgaatgttctgactcatgcgctttatgttaatcaagtgtttgagattgtggatcagtccacaactagttatatgcagatgtggctttattcccgtgttattgtcccagttttgaaatatcatctcagtggagatattatattggataaattgcacgatgtgttccttggaacctttcgttcaatgatggtgccgatgattatgttgaaccgactttcattcgtcgtgaagatgacgacgatgaaccaccaccggaaagcgtatttgccgcttgaagaaagggaaaaaattcatgctgcgacgtttcttggtcatgatcattgggcaagcgttacttcgggatcatctttttatgatgatctcgaaattctcgctgatgagaccgtgaacgatgatttgcattttgataaagaatcttccatgccagatgagtatcagatcatgtggaatgatggtacaattgattccgtttggtctagtcagtttgaatgcgaagaaccaccgaaaccgaaatttataccacgcccttctgataaggtgtgtgatccagtggttattcaagatgccgtgaacgatatattcccatttcatcatgagatggatgatcgatatttccagacgttagtggagacacaggatatttcccttgaggtttcgaagtgttggatagatgcctccaatttcagagattttgttaagggtccaaattcttatgttgagcctgtgtttcaaaccggtgccactagtaagagagtgcatactcaacgtgaggctcttttagctgtgaagaaaaggaatatgaatataccggaattgcaatccactttcgatcttgatgcggaagtcaacacgtgtttcaaacggtttctcacacacgttgttgatttgccacgattaaaaaggttgcaacctatgactggtgttgaggtggaatacttcaatcaatacttgcttgggaagaatccacctgtgaaggaatatcaaggtcccttgacattgactgcacttgataaatatatgcatatggtcaagacgattgtgaaaccagtcgaggacaattcgttgaagcatgagcgacctttgtgtgccactattacctatcataagaagggtatagtgatgcaggcctcacctcggtttttgagtgctatgtcaagattggtttatgtcttgaaatcaaaaatccatattcccagtggtaagtggcatcaacttttcacgctggatgctggaaaatccgatgccgtaaaatggtttaaagaggtggatttttcaaagtttgacaagtctcagggcgagttacatcacaaagtgcaggagaagatatttaatgctttaaagttacctcccggatttgttgagatgtggttttccgcccatgagcgatcacacattgtggacagagaagcagggattggattttccgttgattatcaacggagaacaggagatgccaatacgtatttgggtaacactttggttactttgatttgtttggctagagtgtatgatttatgcaatcccaatattacctttgtcatcgcttcgggtgatgattctttaattggaagcgtcgaagaattaccgcgcggaccaggagaatttatttacaaccctgttaattttgaagcgaaattccctcataatcaaccatttatatggctcaaagttttagtaagtgttgatcttgaggatggtggaagagaagtgatcgctgttccaaaccctgcgaagttgttaattggtatgggaagacgagactgtcaataccaagctcttgatgatttgtatcaatcatggcttgatgtgatatattattttagagatgctcgcgtgtgtgaaaaagttgctgatttgtgcgcatatagacagacgcgaagaagctctatgtatttattaagcgctctgttgagcttgcctagttgttttgctaataagaagaaatttaagtggctctgttatcgtttaagagagcaagggtgtctgaagaaggatatttatcctgtagcaaaacctataagtgcccataatataaggaaagaagattcaaatggatgcgatgttaatcaaggaacagatgattcgttctcacggaaaaagaatcgtggatgctgggagtatgtcccaaagatgttgcagactgatgtgtctgttcctgttactgataaatctttccacagtaacagaggctcgtcggtttccccaaccgattgcggtgatggagggtgctccagatccgccagctcgattggtagtaaaaataccaaacctcgccatagatttcgagctgcaggagttcaccaacccagcggtcgtgatccagaccgtataccgccgaatcatcgacgaagtgcctaa

SEQ ID NO: 2772 - DNA, 2364 bp, Olive latent virus 2 RNA 2
  source 1..2364: mol_type = other DNA
atggccggagtactttatgatgaggagtacgttccccaggaaccggattacttgtattgcccgtacgagtgggagggtgaagatcctacccaatgcgatgcaaatgttccgtccgtcagctaccttgtggaggctgtaaaaaaatcctttactgagggtaaccacgatatgctgatttcttgcgagtcgtaccacgccgagtgttgcgagggtcccttgatgaacaagggtttgaccctctcgacttactttatgagttatccgggcatttcattacctgcgttcggcggtggtgtgattcatgtcacttcagctcgcgtctgcatgcaagctttttatgccgtgaccccaggaaggtgtagttgttcgtgtggtacgcaattcatctatcgtgccaaaggtggaactggtctaacatttgacgccacgaacactatttctagtgcctttaagttcgaagacgggaaagtgaaatggttaacagaagacctaggcttggcattattggctggttgtttcttgaaatacgtgccaatacctcatgagattgaaattaagatcgaaagaaaggtcgagcccgtgtctgctctggatttttgggaaccagaaggattgatttctgacgtacatttcgtacatccgcaagagagagccttggctcctgagcctccaatggatgtagagatggtgagattagtccgtacggaattgtttgaacactttaatcccacccttcttctgaacgctcggtcggatttttccggtgagaaactgaaagaggttgagttgccacgagctcaatcggaacccttagtccctagggtctgtctcccgcgaggtgatgacgctttaattgatcagtttttcatagacaaggcacccgagcattttaatcgtgaacctgccacagatcaatggcaggtggaatctgatgactttactgtggatttccccacccaagtgcgattacgcgaacgggacgaagattggttcagaaggaaacccgatttcgctgtgtcgtccattcgtacaggtctcgagatgcctcgaattgctacaaagaaggaaatgttaatggcattctcgaagagaaacgttggagctcctcagatggtagaggtacctcaggagatccacgtgaagaggttggctgataggttcttccggacattcttgaaagaaggcggctgggataagggggatggtcattattgggatgattttttccatagaaagggtcgaaaggtcttttcattggagaattgttacgatgaccccttgtcctcatacttagttatgctgaagtccgctgggaaattctctctagatctgaactttccggttcgatcggtaccccaaaccattacttatcatgagaagtgggttaccgaggttttttcccccatgtttctgcaggtgatggcaagatttttctctcgtctgcaagattgggttgttgttccggctggtccgatggctgacttctcccgtgtttggcctagctttgaggggaagtgtttaacagaaattgatctgagtaaatttgataaatctcaaggtaagctgttgcatgatgtgcagagggagattttcctccgtctgggtttcccacccatttggtgtgattggtggtttaaattccacgagtcttcctatttaaatgataagaaccttggtatagctttctcagtagattaccaacgtagaacaggcaatactgccacttactttgggaacacgttggtaacaatgattatgatggccgaagtgtatgaacttgattctctccctttctgtggtttgttttcgggtgatgacaacttgatcgtgactgatcgacctcttgaaggtcgagtttcgttattcccgaacatgttcaacatggaggccaaggtgatgcgtccgggtcagaattacatgtgtagcaaatacctttgcactgtagacggtcgcgtaacccctgtccctgatccttttaagttgctgaagaaagctggtgcctcgtgtcctttggagcaccttgatgacttttacgaatcgtttctggattataccaaatacctggtgagggatgaagttagaacattaatacccaggttgatggcccacaggtatcaagtctcgatggatgaagctggagttgctcttgatcagattatgagctggcgaaagtcaaagactcaattctttaagcatttccagtacaggaaaccaatcaaggactcgctcgaggctgtgaaatccgacttcctttctgctttcggaaaagtagatgatcgaataagagtttggcgcgggcgtcgaaccaatcataagaaggaggtcgatgctttaaaggtcccattggtgagttttagggagtga

SEQ ID NO: 2773 - DNA, 4950 bp, Citrus yellow vein clearing virus isolate CQ
  source 1..4950: mol_type = other DNA
atggccactattaggggtgccatcgaacgcattacagacaccaccgtacgcactacacttcaagaggaggcatgccgccaaatacgcgctgaacttaaaaacgtcgaacacatcaaccgttacgctatacagcctgacgccgccgacgcactcgaacacctaggcattggttctaaccccttctctgtggcactgcacacacacggtgcctgcaaagcgattgagaaccaattactctatgtagttggtaccttactcccaaaagaacgtgtcaccatgctcttccttaagaaaagcaagctcaacatcatgaaacgctgccctaaattccaagacatcttcctgaaccaacatattgaaccacgcgacgtttctaggtactgcgactttaacgtccaatccacctccaccagcatacccacacgaacggcttacatcagtgacacactccactttatggaccgtagagacctagtccgactattcctaaacagcccaaatctagagactctctacgccaccattgttctcccagtcgaggctgcttacaaacaaccgagccgctacccagagatataccagattaactatgacttcgacggtttccagtacatacctggaggccatgggggcggcgcctaccaccacgagttcgaacagctgcaatggttagacactggccatatccactggcgtgggcccgactgtaaagagattcgcatgacaattaccgcccaaatgctcgaaagcttaggtgcgaatcatcttttctgcttcaaacgtgggaaactactcaccccacgtgtacgcactttcggccgagatacccaagtgctcttgcccaaaatcttccgcccggccgacaaaaactttaacagggcaataccactaaccctagctaacaaactactcctgtacgctaaatccattaacacagtgaccttccgcgacgtcgttgccaagacacgccaacttatgaaggacaaggagcttgaaacatacaccggcaacgacctgttgcatatggccaactatttcttcgctgttggagcactgtcaggagttaactcctatgaccaattgcttggcctatccgcctgggaagcctgcaccgtccgtatcaagaacaccataacaaatctctgggaaaagattgccggaaagaaagagttcggcaagctattggaggcccttgagtgggaaacattcacatactcacgtcaagtgaccgaattcaccgttacgggactgcccgccctgctccccctcccagacatctcagaccaagaagagattttcgcccagcaggacgagttagacaaaatcactgccggcgctaccaagatacggactattgacattatgcggggacaagctaaccgcgctaacccaaaaactccgatcaactcaacaccggcccagggaccccaactgcccgatacccccgacccaatcgaccaagctgcctccaaagacctcgtcaccaagcttcagaaaaacaaacgcatttacatccaagacgacgggccggaataccttatgggacacatggctgaagtccctgcctggtatcttgaacaagatgataccaccactagactcaaaaaccgctgcgcttggttcttcggcccacccacctacagatatgggcacaacgacattgagtacaccaccatagaatactacccttgggtcgagcgtattggagccattttcggcaagtacaacacctgtcttgctcaaacttacgacgccggagcccgtattggataccacgctgacgacgaagactgctacgaccccgacgtcaccgtggtcaccatcaacctcactgggaacgccaccttcctgctcaagaccccaaccggcactaggacctggaaacttaaacctggtgacttcattatcatgaaacccggtgcccaaaggtgcacaaaacatgccattagagattgcacaactaaccgcacatccttaaccttcagatggcaggcccgcacttgccccactaacctcagaaagatcactaacctacccaaagccaccaaccaaccccaaaccactgaatggcgtcctgtaactaaaccacgccctagcaccaccgcttccagcgacacccagaccccacttgtcatagaccaggaacgagggtataccaccacctccgacgtgacaccaacgattaggctgcccgccgaaaatggtaataacaccggtgctggaccctcctccgcattaaccctcgccgacctgaatgataaccaagcgccgaccactaacaaaggaaaagagaaacttgaggaaatggtcgaaactggcccaactatcatggaacgcttcctcaacaccgttcaggaaccaacacaagatttatgggactccgcctctgaatccgccgcgagctacctcgctgaaggcctcggcatctctgccatccaagcactcccttgggcacctcacttggaactcatcaatgcattaggcttccagggcactgaaaggcaatacggcccagacaactgtctcatatggcctatcacgcattacagagaattgcccagaagcaacaatgtcgaagcccctccggaagtgcttgagctgctcgactgcatcaatagataccccactgacgtcccaatgctcaaaactcgagccgccgccttcggttcagacgtcaagaatctacgcataggggcacttgttaagaaccaggacaaacagtggcgcgcatcactcgcactactttgtgaggaaaatgaacacctcctccctaccactgtaatacacggcgctggtggctccgggaaatcccacttactccaacagtgggtggcgtctactgagcgcggaaatgtagtcaccatcttgcccactatcgaactccttcgagactggcaaaacaaatgtccacatgcaccgaaagagactttcaaaaccttcgagaaagcgctcatccagaacagcgcccccgtggttatcatggacgactactctaaacttcccccagggtatattgaagcctacgtcagcctcaagggccagtgcaaacttctcatactcactggagatcctagacagagccactaccatgaggagaaccctgaggccttaatctctactcttgaccccgccacggactactttggcaaattttgcgcatacaacatcaacgccactcatagaaatgccaaaaccttcgccaatgcgcttggggtgtactctgaaaaagaaatccccaccaccatcacctgctcatcctaccagaaaagcggttggccaacacttgtcccatccatccttaaaagaactgcgctcaacgacatggggcagcgctcactaacctacgcaggctgtcagggactcaccaccccaaaagtgcagatagttcttgacaacgccacaccactatgctctgacaaggtcatgtacaccgcactatctagagcggtggaccaaattcacttcttcaacactggcccaaatcacactgattactgggaaaagatgaacgccacacctttcctcaaaactttcatcgaccacacacgtgaggagaccttcgctgagcaccaacctgccgaacccacagtgcgtgagtacgcaccagcaacgcatttcccaccggctaacgagaacctagcactagagccgtgggtcgaaccgctgactgataaacactcgcgggaactcttccactctgccttaggccacagcaactgcgtccagactgaaaacaccgtagtccaactttttccccaccaacaggccaaagacgaaacgctcttctggaaaacaatagatgccagaatcaagataaccaccccagaagagaacatcagggcttgcagcatagccactgacattggcgacatcttgttcctaaattacaaagaagccatgggtttaccacaagaccccatacccttcgaacaggcactctgggactcttgtcaagccgaggtgcaactaacctacctcagcaagcctctggctgcactcgcaaatgccgcccaaagacaagaccccgactttgactccaacaaaatccaactcttcctgaaatcacaatgggtcaagaaagtcgagaagatgggctgccttaggatcaaacccggccaaactattgcttccttcatgcaacagactgtcatgctatacggaactatggctcggtacatgcgccgcatccgcacctcactttgcccacccgaaattatgatcaactgcgagaccaacccaaaccaaatcggaacatgggtgcgtgagtattggaacttcaacacccagagccatgagaatgactttgaagcgttcgaccaatcccaagacgccaacatgttacaattcgagctcattaaggccaaataccactcaatccccgaggagatcatcgccgggtatcgacacctgaaatgcaacgcccacatcttccttgggactatatcgatcatgaggttgtctggtgaagggccgacctttgacgccaacacagagtgctccattgcatacaaccacacaaggtactttgtgccgaaaggcaccgcccagctctacgccggagacgactctgcatgcgcgtcgcccctctctgaaaaacccagcttccaacatatctcaccagagctcagcctcaagtctaaggccaagattagaacccaacagaaaggagactttgcgaccttctgtggctggctcatcactccaaaaggcctgatcaaaaaccccacccagctttacgcctcctggttattggctaagcacaacaaagatctcgcggacgtggccagaaactatgccttggacttacgcattgcctatcaacttaaagacgagctctatgagttattatcacctgaagaacttgaccaccaccaactgctcgtccgagagatgatcaagcacaaaatgggccatctcctcaacctccctgaggggtttaaaacaaactaa

SEQ ID NO: 2774 - DNA, 5343 bp, Potato latent virus, complete genome
  source 1..5343: mol_type = other DNA
atggctttgacttacagaagtccattggaagatattgttggtgcatttgaaccaagtgttcaaacagctattgcgaacacagctgctaaccactacaagcagcttgaggaagagaagggaatcttatttaattatgcattgccacctgaggccaaacagaggttaataggcgctggcatatatttaagtcccttttccgctgttccacattcgcatcctgtgtgtaaaattttagaaaatcatctgttgtatgtagagcttcctagtagactagataattcttttatgtttgtaggtattaaaaactttaagttggatctgctcaagcgcagacatgcaaatctaagcatgatccaaactatcaatagatatgtttgtagtttagataaaataaggtacggttcaaatttcgtagttagatctagcgctagttatccagagctttgcagacgcaaaggtgagcttgacggagcagtgttgagggaattggtgcctgagttgatgattaaaagcgctaagaatctattcttgcacgatgagcttcattattggacccatcgggatctgattaccttcttggaggtactgaagccagacaaactgttgggcaccttagtttacccacctgaattgctaaagggtgcgaagaaaagtttgaactcttggtgctacacatatagagtggacaaagacaaattgtttttttatccagatggcgtccattctgaaggctacgagcaaccattgagtggcggttacctcctcgaaacaagtaggattaccacacgtgatggtgaagtttattgcgtcgatgttgtgtgcagtaaattcgcgcatcatttgattgcaataacccgtggtgatctgattgtacccacacaacgcagttttgctccctttgaggccataactagtaaaggtttgaataacttggtgaggggcaaggtggaatgtttccccgtatgcgcaagtgtagtgtctaaattgtataggtatttgcgcacactcaaaaaacccgatgagcaatcagcaatggccaaattgagccaacttcaggcaaatcccactggggaagagatacatttcatccagggctttgccaaattggtgataaatacaaacaaaatcgacagtttaatcaactgcgatagtattaaggtgttcatgggcaaattgtttggtccgttgcccaattggcttaccaagagattgaggagcgtgcaagaggtgtctctcgatgaatttgtccattactttgaaccatatgtcgtcaacgtgcccactaagcatgtgaactatggttttgagttcaattacgtaatggaagatttcaggtacgagcagggtgagaatgatctagtggatatgctagacaattttgatggctccacaaagatgagcacaagcctttgcatgatgaccccatacgtcggcttagcaccattgaccacgcgacgcaaattcctatgccatatcgaggagaattccatattcagagtggtgtctaggaacatcttttgtagctacacaaatagttacaaagtggccgtgagcactgagggggtggttcggatacttgagatttatagcaaagtgtctgtggatctactgggagcgtatttgggaaaattgctcaagaaaacagagttcatagagagagtgcgatcaagggttaaggcaattgccataaagcacctcaagtacacttggcaacaggttggtctagcttggttcaccagtggaaggcgtggctacacaaaatacattgattgcagcccatacacgatgaataccttcaaagagcttaaagagagatggggtgtgattgtgcgtgaattgtctaaacagcaggacaacgctgaagctgcgaaaaacatacctgagcaggaaattcaaacgaccagcaaaccaagttgtgtggagaagcgaaattacttctcgaacactttgatgactagctttgctgcgtcaggagtgaaaggcaaggaacaggtgagctccgaaattgccaagggtaggggtgaaaggagcgaattgagggcaactaaattgatgggctcatgcagcaccctcggcaaagtggctcacatagcatcaagaaaaggctccatgggggtattggaatgtgtagcgagggtcatcaaattggatttccaaaccgccttgaagttccttagagtcaagggtgtgtggatgcaggagtatgagagcataggcgagttggaggaggagcagatacagagtcctgcatatgatttttgtgctgcgatcgcaatgaccttcaatgttgaaattgaattgacgttcccaggctcagagcttgtttaccacttcgctgcaagttcaactgtgagttgtatccgcttgagcatttgggaaggcgtagtcacactgatgagggctgaaaatgattgcgttatcactgcatgtgcacaagctttagctagggagcctgaggatgtagtgaaggtgctcaaagatagattggaggagagcatactggaagagatttggaacggcgaaggggtgcctttcgagagaatgtatctcttctttgaagctctggatattcaagcacattgcaatcgcgatggtgcacagctagtgttgaatggcgggggcaagctggcgcgatgtttcgtgattaaagaagatcacatcgagttcgcaggtgagaaaaaggtcagtagagtacttgagctccaggatgctagaacaagtagtaaagcagacccagaattggtcaaggagtttcagaaagccgggactgtggtagaatatgtagcagtgcaatccagagcgcaagtcctggcgaagagtctagtggatgcaaccactggggtgtgcagctcaaccatattcaatgactgtgagagcttggaacgttcctttagattcaccgaaagcgaactagcgcgaaatgtttgttgtgttatcggtacgtttggggctgggaagagtaccctgttcaaggatatgatgaggcagtgcctagggaaaggtgttcactacgcatcacctaggaaggtgttggcgaatgagctcaaagctagtttgggtttggcaaaagggaagcggaatcgaaaagtagggacagagaattggaatgtgcacaccttcgaaagtttcctaaagaaggcgaaaaatgttgcagagggtgagttggtgatcattgatgagatccagttgtacccgcctggctacctggatcttctactttacctcatacctgagttcactagcgtcttcgcggtcggtgatccatgccaaagtgattatgacaacgagaaggataggcatgtcttcttaggggttgagacagatgtctgtaggcttctgagcggccgtgagtacgaatttaatgtactttcccgcagattccacaacttaggctttgaaagcagattgccctgcagattcaaattcccggctggagcagtcaaggaagagtatttgttcgttaattcaatgactgaggctaatgagttggacagcgcctacaaaagtgtgtaccttgtgtcatcccacttggagaagaaaatagtggagtaccagagtgacgttaaaacgccgaatgtgctgacgtttggtgagtcgactggttgcaccttcaagtatggttgcattctcatcacgcaagtgagtagcgcatgtagtgagcgcaggtggatcactgctctatcgagattttctcacaatctctgtttcatcaatgcaactggtgtgcccatagaaaatgtggcgaagagttacaaagacagaagtttgggaaaattcctgtgtggaactgctgttgagggtgatataaaatcaatggcttatgggaccccaatcttcaaagagcagttcatcgccggcgttgggcgcgatgaaggtgtcaaggaggataaagtcaccggtgatccttggttgaaaaccatgttggatttgatgcagctcccagatgttgaggaagcagagatgatgcaggaagagatgcaagaagagtggttcaaaacccatttgccacaagaggaaatagaaggggtcagatgccgctggattcacaaaatgctagctaaagaagcgagggaatgtagaatgggatcgatcgtttcagaccaattcccagatgatcatagcaagcaagaggggaagcaaatcactaatgcagctgagcgttttgaagctatatacccaagacatcgggcaaacgacacagtcacattcattatggctgtgaagaaaaggctgagattttccaggccttctgttgagaaagcgaagctcacgcaggctgaatgttatggaacttacctgctcaaaaacttcttggatgtgatcaagctcaagcccgcacatgatgaggcaatgatgatcagagcgaaggaagattttgagcagaagaaggtgagtaagagtgctgcaaccatagagaatcacagtgggaggtcatgcagagattggtgcatagatatagggcagatcttttcgaaaagtcagatatgcaccaaatgggacaacagaatgcgggtagctaaagcagcacaaacgattgtttgctttcaacatgccgtcttgtgccgctttgctccctacatgaggtacattgaaatgaagctgaaagaagtgctgccggctcggttttacattcatagtggcaaaggtttagatgagctcaactcttgggttaaagaaggtaggtttgagggagtgtgcactgagtccgattatgaggcttttgacgcttcgcaggaccagtacatcgtcgcttttgagttggcactgatgaggtaccttaggcttccaaatgacctgattgaggattacaagtacataaagactcacttgggttccaagctggggaattttgcaatcatgcgcttctctggtgaggccagcacttttctattcaacacaatggcaaacatgctcttcaccttcatgcggtatgagcttcatggcgatgagtacatttgctttgctggtgatgacatgtgttcatcaaagagattgcgaatcaagaaaacacatgaaagctttcttggaaagctgaagttgaaggctaaggtgcaacacactgagaagcccacattttgtggctggaatttatgtgctgatggaatatacaagaagccacagctggtctttgagagaatgtgcattgccaaagagctcaacaacctgcacaactgcatcgataattacgcaatcgaagtggctttcgcttacaaacttggggagctggctgttaacaggatggatgaagaggaattgggggccttttacaattgcgttaggctcataacaaaattcaggcatctgctcaaatccaatgtagtggaggtctttaagcgtaaatag

SEQ ID NO: 2775 - DNA, 6318 bp, Apple stem grooving virus
  source 1..6318: mol_type = other DNA
atggctttcacttacagaaaccccctcgaaattgcaatcaacaaacttcctagtaagcagtctgatcaactgctttccttgaccaccgacgagattgaaaagaccttagaagtgaccaaccgcttcttctctttttcaatcacaccagaagatcaagaattgttgactaagcatggtctaacacttgcacctatagggtttaagtcacactcccatccaatatccaaaatgatagaaaatcatctcctgtatatatgtgttccgagtcttttatcctcctttaagtcagttgcctttttttcacttagggaaaataaagtagacagttttcttaagatgcattcagtcttttcccatggaaaaattaaatctttggggatgtacaatgctataattgatgggaaagataaatataggtatggtgatgtagagttttcatcttttagggatagagtgattggtcttagagatcaatgccttacacgtaacaaatttccaaaagttctgtttcttcacgacgagttgcactttctaagtccatttgacatggctttcctatttgagacaatcccagaaattgatagagttgttgcaaccacagtttttccaatagaacttttattcggggacaaggtctctaaggaacccagggtttatacctacaaggtccatggctcttcattttcattttatccggatggtgttgcctctgagtgttacgaacagaatttggcaaattctaaatggcccttcacctgcagcggcatacaatgggctaacaggaaaattagggtaaccaagctacagagtctcttcgcccatcatgttttctcatttgacagggggagggcttgtaatgaatttaatcatttcgacaaacctagctgtctacttgcggaagaaatgcgccttttgaccaaaaggtttgataaagcagttattaacagaagcacagtctcttccctcagtacatacatggcttgtcttaaaactgcaaatgcggcttcagctgttgccaagctgaggcagttggagaagagggatctttacccagatgagttgaacttcgtctattcctttggagagcatttcaaaaattttgggatgagagatgactttgatgtgtcagttctacaatgggtcaaagacaaattttgccaggtcatgcctcacttcatcgccgccagtttctttgaaccaacagaatttcatttaaacatgcgcaaattgttgaatgatctggctactaaaggaatagaggttcccctttctgtgatcatcctggacaaagtcaacttcatagagaccagatttcatgccaggatgttcgacatagcacaggcaatcggggtgaacctagatttactggggaaaagatttgattatgaggctgagagtgaagagtacttttcagagaacggttacatctttatgccctctaaatcaaatccagagagaaattggattctaaattccggttcgctgaaaattgactattcaagattggtaagagccaggagatttagattgagaagagatttcctagatcccatatctaaaggaaaatcccctagaaaacaactcttcttggagtcaacgggaaacattaaatcaaatcccaatgctgaaaaaaatagcgagagcggcgaaataaagattgaaggcagtgccgaaaatgatcagccacatgaggtatcacatacttcaatggaaaccgaggatggacagggttttgaaggttcaataccagttgatttaatcaattgctttgaaccagaagaaatcaagcttccaaagagaagaaggaaaaatgattgcgtcttcaaggccatctctgcacacttggggattgactctcaagatttgttgaattttttggtaaatgaagacatatcagatgaattacttgattgcattgaagaggacaaaggactgtcacatgaaatgattgaagaagttttgatcacaaagggtctttcaatggtttatacttctgacttcaaagaaatggcagttcttaatagaaagtatggagtgaatggcaagatgtactgcacaattaaaggcaatcactgcgagctgagttccaaagagtgcttcatcagattattgaaagaaggtggtgaagcgcagatgtcaaatgaaaatctaaatgctgattccttgttcgaccttggaagatttgtgcataatagagacagggctgtcaagctagcaaaatcaatggcaagaggcacaacaggcctcctgaatgaattcgacctagaattctgcaagaacatggtgaccctttcggagttgtttcctgaaaacttttcttctgttgtcgggctaaggcttgggtttgcgggttctggtaaaacgcataaggtgcttcaatggattaattacactccaagtgtcaaaagaatgtttataagtccaaggagaatgctggcggatgaagttgaacctcaactcaagggaacggcctgtcaggtgcatacatgggagactgcacttaaaaaaatcgacggaacttttatggaagtttttgttgatgaaataggtttgtacccacctggataccttacactgctacagatgtgtgctttcagaaagattgttaagggacaaagtgaaaatttcttgaaaggcaaactgttggaattgtcaaagacttgcttaaacataagatgttttggtgatccattgcaattaaggtattactcagctgaagacaccaatctattggacaaaacacatgatattgacctcatgatcaagacgatcaagcacaaatatcttttccaagggtacaggttcggtcagtggtttcaagaactggtgaacatgcccactagagtggatgagtcgaaattctcaaggaagttctttgcagacatttcaagtgtaaaaactgaagattacggactcatcctagttgccaagagagaagataaaggtgtcttcgctggaagagttcctgtagcaacagtgagtgaatctcagggaatgaccattagcaaaagggtgttgatatgtttggaccaaaatctttttgccgggggagccaatgcagccattgttgcaataacaagatcaaaggtcggctttgactttatccttaaagggaattcattgaaagaggtacagaggatggcacaaaagacaatttggcagttcatcattgaagggaagtctattccgatggagaggatagtgaacatgaatcctggagccagcttttatgagagtcctttggatgttggaaattcatcaattcaagacaaagcttctaatgacctgttcataatgccttttataaatttggctgaggaagaagttgacccagaggaagttgttggggacgtaattcaacctgttgagtggttcaaatgtcatgtgcctgtcttcgacacagatccgacgcttgcggagatttttgataaggttgcagcaaaagaaaaaagggaattccagtctgtgctgggtctttcaaatcaatttcttgacatggaaaagaatggatgcaaaatagacatcttgccctttgcgcgacaaaatgtttttccacatcatcaagcgtctgatgatgttactttctgggcaggtgttcaaaaaagaattagaaagtcgaactggagaagggagaaatcgaagtttgaggaatttgaaagccaagggaaagaacttcttcaagaattcatctcaatgctaccgtttgaattcaaagtgaatatcaaggagattgaagatggagagaagagctttttagaaaaaagaaagctaaaatctgagaaaatgtgggcaaatcattcggagagatcagacattgactggaaacttgaccacgcctttctcttcatgaaatcacaatattgcacgaaggaagggaagatgttcaccgaagctaaagctggccaaactttggcctgtttccaacatatagtcctatttagatttggacccatgttgagagcaattgaaagtgcctttttgagaagctgtggagactcatactacatacactccgggaaaaacttcttctgcctggatagctttgtgacaaagaatgcaagtgtctttgatggattttcaattgagtcagactacacggcctttgactcatctcaggaccacgtcatattggcctttgaaatggcactgttacaatacctgggcgtgtcaaaggagtttcagctagattaccttagactgaaattaactctcggatgccgtctcggatcactagcaataatgaggttcacaggagaattttgcactttcttattcaacacatttgccaatatgctgtttactcaattgaagtacaagatagacccaaggaggcataggattttatttgctggggacgatatgtgttccttgagctctctcaaaagaaggagaggggagagagcgacaagattgatgaagagcttttccctaactgcagtagaagaggtgagaaaattcccaatgttttgtggatggtacttaagtccatatggtatcattaaatctccaaaattgctgtgggccaggatcaagatgatgagtgagagacagcttttgaaggaatgtgttgataattacctatttgaggcgatatttgcctacagattaggtgagaggctttacacaattttgaaagaagaggattttgaataccattatcttgtcataagattttttgttagaaattcaaaattgttaacagggttgagcaaaagcttgatatttgaaattggggagggcatcgggtccaaatggctatcgtcaacgtcaaccgcttcctcaaggaggtcgaatctacagacctcaaaattgatgctatctcgtcctcagagctttacaaggatgcaacctttttcaaaccagacgtgcttaattgcatcaaaaggtttgaatcaaacgtcaaggtttcctctcgatctggtgacggcctcgtcctgtctgatttcaaactgcttgatgacaccgaaattgattcaatcaggaagaaaagcaacaagtacaaatacttacactatggagtcatcctggttgggatcaaagcaatgttgccaaactttagaggcatggaagggagagtcattgtatatgatggagcctgcctggatccgaaaagaggccacatttgctcgtatcttttcaagtttgagtctgactgttgctactttggtctcaggccagagcactgtttgtctaccacagacgcaaatttggccaaaaggtttagatttcgtgtggactttgattgtccacaatatgaacaggacactgagttgtttgctcttgacattggagttgcatacagatgcgtcaactctgcaaggtttttggaaaccaaaactggcgattcaggatgggcttcacaggcaatcagcggctgtgaagcacttaaattcaatgaggaaatcaagatggccatcctggatcgcagatccccgctgtttctggaagaaggtgcaccaaacgtgcacattgaaaagagattgttcagaggtgacaaggttagaaggtcacgctcaatttccgctaaaagggggccaaactcaagggtgcaagaaaagagaggatttaggtccctctcggctagaattgaaagatttggaaaaaatgagtttggaagacgtgcttcagcaagcgaggcgccaccgggtaggagtatatctatggaagactcacatagacccggcaaaggaacttctgacggttcctccccctgaaggatttaaggaaggtgaaagctttgagggcaaagagctttaccttcttctttgcaaccattactgtaaatacttgttcggtaatattgctgtctttgggtcatctgataagacccagtttcccgctgttggatttgatacacctccggttcattataatttgacaacgaccccaaaggaaggggagactgacgaaggaaggaaggccagagcgggttcgtctggcgaaaaaacaaaaatttggaggatcgatttgtcaaatgttgttcctgaattgaaaacctttgctgccacttccaggcagaactctttgaacgaatgtacgttcagaaagctttgcgagccatttgccgatttggctcgagaatttctacatgaaaggtggtctaagggattggccaccaatatttacaagaaatggcccaaagctttcgaaaaaagtccatgggtggcctttgattttgccactggtctgaaaatgaatcgtctaacacctgatgagaaacaggtgattgatagaatgaccaaaagactttttcgtactgaaggacaaaaaggggttttcgaggcaggttcggaaagtaacctggaactggagggttag

SEQ ID NO: 2776 - DNA, 5889 bp, Citrus leaf blotch virus, complete genome
  source 1..5889: mol_type = other DNA
atggctttgatgagcaacaaaactgcaattgaatctattttgggtaactttgaaaagaaacacgtcgatgcaatctacaatgccgccgcacaaactatcctctctcactctgaatttaggaataagcattttgcttattcactcaattcttatcaaaagaagatagcctcaaaggtgggtattgaattgtatccaaatggttatttaccacattcccatccattgtcaaaaatttttgagaaccatttgctttttgatgtacttcctggcgtagtaaatactagtagattagttatgtgtagcataaaggagtccaaagttctggtttttaaagggattcgcgacaaatccagaagacaggtttcagacctcaatgccctcaattccttaaataatagtcatacatcattcattaataggttagttgcatccaaagatgtgagtagatatacggaagaagctgatgctttttttcaatccaagaaagggagtccggagctattttcaaggaatttcatcaaaagcttggaaaataaagaggctgttttttttcatgatgaagttcatcactggactaaggcccaaatgttctcatttcttaaaagcacgaaggtcaaaaggttcattttcactgtagtctatccaccagaaattctcaaaaaatttgccaattcccagaacccaaaggtttatgatttcaaagttgataagggtcggctttttttttttccggatggggttaagacagaggcctatgagcagaaattgaatatggagtggctcttttcagcatcacatcttcgcagtggagactgtgtatggactgtaacaagacataagagtatttatgctcatcacctgtttgagatatccattggcgaactagtcacggactcaaaactttttttttccgattataactccattgacatgtctaaaatatttcttgatcgttttcggagttatgaggtattccccatttcgattgagcacctttataaggtctactcttatctgctttgcctcaaaaaacctgacttggagagtggtctagctaaattaaggcaaattattggagatgatgtcgaaatcaaagaattcctcttctttgaacaattttgtaagcgcttaattgaacgccaaacctcttgggggctatttgggcactctttctttgaaaaattaaccgatatggcattgtcatccttgcccaactctatagcccgaatttttcctcaatggaaaaaaaaaaacacatttgagttccttttctcacttgggactcttgttgtggatgtggagagaaaggtgtgttttgaacatgtgcttgaggaatggggatttgaagttgttatcactgatgaaaatgcctatcttgatccactatctatctttgctatcaatgaaaattttaatgaggatagagtggacgatggttatttggaaagaatccgtcttcccttctggaatctgaatgactatgacttgaaaagaaagagggtaaatgcgtataacattctctcttatcgatttgaagaggagcgaaaaattgaatcagcgcaaaaaggtccaaataagatgctccagattgagtggtacgggattaaagaatttaaagttgacccttttatcagcaactccataactgaatttactcttttagaagcattgctgggaaagaggatagatccaaaaaaatactcatattcaaagcaagcctgcactctttccaactatctcacatttttgtgtgctgagggtttggatggattcaatttggaagagcaccttgaacgaaggttgaaagcggccggtcatgacgtttcagatgacgaggaggaagaattgacttcagctgaacaagcggggcctatcaagatattggctgatccacttggttttatgaaagagtgtttggaggagatcccaatcgaaactgaaccatcactggaagaaagagggcagttttccactgattatcattctgagaaatttgaaatcaattacaatgacatttttaatcctcacaattgcatgaacactcacggcgatgaaattcccacaccgtcagatggcaattgttttttttcagcatttactgaaacttttgaagttgaaagacctgacaccttgaggtctgatttctcagactggcttatggaatttaatggggggtcctatgcttcacttgcagaaatgatcagaccgaatggagtttttatggaggcagaactcatatacttgttttgtgtatttagaggagtcacgttgattattcatgatagaactcatgaaaaagagaatgtttatgctgtacaccgcgggtttgaggagggccatatggtacatagaggcaatcattttgtcgggattgaaacttacaatattagtactttaacctcagaccccttacttggtgacatcccatgcggtttttcagaggaaattacaaaattccattttcggcctgatcatttcaactgtgcccagttcagaggaaggaaggcggcttttatcaccaaagttgatgcagattacgggcacaacggtatggtttacccccacaattcatgggtaccttctttagaagagatcattcagatctgtggtcagggagatgatttcaattgtgcattaataaatttctatgaggcaaactcatctcttgggttccatagggataatgaacgggtgtacaatgatgatcctattttgaccgtctgcacattcggtgaaggtagattcaccattgaatttaaggatcaggtaacttcttttctaatgactgctggctctttctttttaatgcctaaagggttccagaagaaggcaagacactctgtctcaaatgaaatgtcgagagtctcgattactttcaggaagcatgttagaaggttgaatgggtcaccgattgccatcagggaagaaaattacaaaaatacatgcctcattaatgccttttcaaaagcaatgaaaaggagcaaacaggcaatcattgcaaaactgaagactgttaatagccctttctggagtagatacctatctgagggtaacggtggctccattgaagattgtcaatcggcctgtgaggcactggatgttactgtcgaccttaatgtaaatggaaaatgtgtggttcttggaaaaggggctttaagaatctcaatggctttaagaaacaaccatttttcagttatcaatgctgcacaactgatggagaggacttttgttagccacttgcttgaaaaaggaaatgtcaatgtgttagaaggatttgacgcaatgctaagtggtgatgtgggcgcagcaggtgttaacaaaattcaatttgcagccaattttgaatttgctagaattttggcaaattcatttctaaatatgacaactggcatctgcctgggcaaggcattggataatggggaaaagtattttctccacattttgaaagatagagtgaaacagattggtatagacgtcacaatggtgtgcggatttgctggatcggggaaaagtcgcaaactgcagtcctggctgcattcaaggaaaaaagggaacttctgtgtggtttccccaagaacaaacttagccgctgactgggcattcaagttagaattagagcccaatgaacagagaaaggtttcaacatttgaaaaattcatcaaaactgataaaagcaaattagatctcatagttattgatgaattgacattgtttccaaatggttacctggatctcctcgtgtatgaattggctgatgtcaataggcattgtcaaatcatccttctgtttgatccattgcaagcaagataccacaacaaaatggatgaatcaatcctgacatttgaacatgacgtggacaggcttattggtggacagaacattgagtacatttacagcacgcatcggatgtccagatacttcaatagattttttgatgtaccttgcttcaatcaggctgatagaacagaggaacaaaggttgtggatatttgatgacgtttactccataccatccatttgctccgaccgtcaggaaccatgtgatgttcttttggttgaatctgaccttgaaaagaaggcattttcacccatcataaatgttatgacatttggtgaatcccagggactcacatttaatcatgtttgtattttgctgtcagagtccagtgcagcttcaaacgaatttagatggatggtggcgctgacgagagcaaggaccaggttttcactctgttcaaccttcttaggtggaattgaagaatttaaagtcaaaaggaaggaaagtctcatcacatccatactccaaggcgagaagatcacattcaacagattaaatctgatgctgaaatgcaatttaattaggagagaaaaagaaaatgggtgcagagatgaggtcgatagggaggaaaggttggagggtgaccctttcctcaaaccatttatcttcttgggacaaagagttgagaaggatgaagatgaggtagaagaagtgaagatcagggaaccaacctgtcaaactcatctgtatataacagagcctaattttggtttgtgctacaatttcgacttcattagggaaaaagaacagcgggaatacagagaggatatgcttgtaactaaccaattctgtgacagttatgataaggttcatataaacggcaaaagagaaacccctggtcccctgcgattcaaagcgatttatccaaagcactcagccgatgatgacatgacgttctggatggccgtcagaaaaaggcttgtatttagagaagaggaggagaattatcaaaggttgtcaagggcgcatttagttgggggtttgctatacaccaacttcaaaaaaaaaatgggcctggaatttacgtttgaccaaggtctactggaggaaagcataaatgcatttgaaaagaaaaagctggaaaaatcatgtggcacaattaaatctcatagcataaggtcggacattgattgggcgctgaatgatgtatttcttttcatgaaaagccagttatgcaccaagtacgaaaaacaatttgttgatgctaaagcgggtcaaactcttgcctgttttcagcacctgattttggtacagttcgctccatggtgtagatacctagaaacccagatcagaaatcagttgcctgaagaaatttacattcactcaaataaaaattttgatgatttgaatgcatgggtcaaaaaatttttccagagggatatctgtgttgagtctgattatgaagcatttgatgcaagccaggatgaatacatattatccttcgagattcatctgatgaaagatgcgcattttccgcagaaaatcattgatgcatacatagaccttaaatgcaaattgggatgcaaattgggccatttttcaataatgagatttacaggggaattttgcaccttcctattcaacacactggccaatatggcattcactatgtgtagatacgaatggaggagaggacaaccaattgcattcgcaggagatgatatgtgtgcattaaacaatttggctgtttgtcatgatttcgatgacctttttgaactcatcagcctaaaagctaaggtggaaaggacagaaaccccaatgttttgtggatggagactaactccatatgggattgtgaaggagcctgaattagtctataatcgctttcaagtggccattgaagagggaaaggtcttggagtgtctggaaaattatgcaatcgaggtttcttatgcctacagtttaagtgagaggctgtatgaagttttgaaaagtgaaaggcaagttcagtatcatcaagctgtggttagatttatagtcacgcacattgacaaactcaaaacaaaagtgagggaccttttcttagaacaatcttccgacgaagatatctga

SEQ ID NO: 2777 - DNA, 2127 bp, Apple latent spherical virus segment 1
  source 1..2127: mol_type = other DNA
ggacccgagcaaatgtatataccaactgctcgatctgaatcctttggatcagtctgtcttcttgggaaatggactggccctaagccttattttttagagaatagttctttaactccctctctaattcatgactgtatagatatagacatgacaacggagcctgctattctttctaagaaagatcccagacttcaatacactaacaataaagattttgatccttttctctcaggtatgggaaagtatgctgttgaggctcactcctttgatgaagatgaagaattgtttgaggatgctctagatcgagttttctcagagatacctatgtttacctgtgaagatttatctaatgatcaggtatgcaatggtatagaggacgatgattatgctgaaggattggttatgcagactgctgaaggttaccccttctgcactatgcggcccccaggagtcacaggaaagacgtggctttttgcgggatcaccaggtgattggcacatagtccccaattctcttcttgctaacgaacttaatgtcaaagagttgaaccttagcaagaatatttttgaaccagtgataggtatagattttcccaaggatgagaaagttgattcttctaaagtgtacataaaacaaaaaactcgactttttactatcctacctgttgattataatattttagttaggaaatattttctttcttttgtttcacaacttatggccctccataatgaagttcctacaaaggtaggtattgatccaatttctaatgaatggtctattctttgtcattctcttcactcaaaaggaaccaattggttcaacggagattattccagatttgatggaataacacctcgtaatgtgcttcagggcattgtgaagagaatttcgcgtagatatgctaacaagagttcttttgctataacagatcctacactttctatcaatggtgatcttgctagatcccttttgatggatatgtgtagcactcgatatgggctaactaatggggacctttggtatgtcacttctggtataccttcaggatttcccttaaccgttatagttaattctttagttaattctttctttgtgcactttgcttatatgaagcttcattcttctgaagtgcacaaggctttgtatcctctttattcttttagaacccttgtatcatatgctgtttatggggatgataatctaatttctgtacatgacacaattaaagatacttttaatttagttactatatctaacttattgttggagcatggtgtgactcttaagaatggagccgataaaaatgaggaaattttatctccattctatcctatagagaaggtggattttctcaagagacgattcaccactttacaaggacatattgttgctccacttaacactgttaatataactgagcgcttgcactgggttcgtaagggcctaggtgatgctgatgccacacttgagaactgtaaatcagctctctttgaagctttatttcatggagagctgtattacaatgatcttcgaggcaaaattgaaaaagcttgtaaagtgaagggccttcctttgatagtcccagattaccaagacgctctttctttatttttaactggaggctcatatgctaaggctattcaggctatagcgatgaatctccctgatagaatctctctgtacaaatctgaattctatagtgtacaaatatatcctcaaattttttatgtgaccaatgagagaaatgtcacacttcagaaattgctggagaccactactctccgtaacatttgttatgtttctaggaactacgagtctaggagcagttctaggggtcttttcactcttaagggtgaaggttggactccagctgctttgaaagctcgtcttagtgtgtacaaagctatggccaaacctgtttacttcgtagatgaggctaatgatggtttggctatgttttattgcttagattatgcttttcgtgtttgtggtttaacccggagtcaaattgcaaaaattcttaatgcagtttttggtggtaaccccgaagtctgccaaagaattttccaatttttctctcaagtcgagccaaccaataagtacattcctcccaatcaaaggagg

SEQ ID NO: 2778 - DNA, 6588 bp, Soybean latent spherical virus isolate ND1
  source 1..6588: mol_type = other DNA
atgtctttccattgtccaagttctacttgccttggttacactcaatctttctctcgccgtgatatgcgagagcaaggggatcgttgtccccatgctatgtgtggtgctcttctagtgaagaaggtgcccactttatccccacagggtgccagacctgtggtatcaaagaccactgttgtggtccctcctcaagccactgaggaggttttgtattatgggtgtgcccccagacccgcttttcttgaagcggttttggcggccccaaaattaaagatggctccaccagtggtggatgcgatggaagtcgcatacctccgtggtgttgcagccatggaagctgaggagaagaaactcctcaggaaagaaaaggctgcagttgtggcccgtgctaaggcacggcgagctgcaaggaaggcagccaagaagcaagttgccgagatgaaggcaactgtggccctgaaattggccacaaggcaaaaaactgcacgtttgagtgcagctaagagggccatgaaggccaaaagaaaggcagccaaggaggctgccaggttggcgcttgaagagcgccgtgctgcgggtttaacccgcaaatcggccttcaggcgtagcctgaaaaagaaagccactaagatggctggtaggaaggtccctaagacctccacttccacctttcccaaggtggaatctttttcttgttttccttcttctcccctccctgcttttattagggaggaacagccctgggtggctgtgaataccccctgccctcatcctgagggcttcgatttggcggttgatcccgcctttgtggctcctattgtggggccaatcgttagtgtgccatttatggcacctgttgtgaaggcttttaatagccttgtagaaattttggcggctatcaattatgaggccgctgtagatttaagagcctacattttagaaatagcttcttacgaaaatttctttgctttacggagaatttttgttggaaaagctttatcttggatggctcttatcctacctctttatccctatgcgggcatctttgatacttatctcccacttgatatggtggaagataagaattgtgatgcttatttagcctcattacagcagactgcagtgatggtgctggaagtgacccagggaccaatggacgcacattctatctttgatatagtgcgttccgttggttctaaggttgctagcataaaggacaaggtagtgggatgtatagttgagaaatctgctgccctgttggacactgttatagacacagcaaagggcatgttttttggagttcttggcccataccttgcccgcgcacagaagatcggagaggaaattaaaaaattctgggataactgtgtcgagtgggcaacaaaattgtggcaaggagctcatatagcattacaagctcttggcatttatgctgtttgggctatagttgctatggtgcttgtaggagtaatgtatatattagaaacaattttgatttgtttaggtgtaatgagtggtcatggtgtccttgttgttgctttgacaggggcagtcatgacttttttaggttttactgtttttcagatggggcgtgagtatatacattttttgaccgccctacgtcaaatcattttcttagcagttattccccaaggaggattgactcaagttaatatcatggattcgtccgttgatgttactgagccacactccttgttagatactgctatggcaccagttcattttttggaaactgttgccagtggtttaacattcttttcttctacctctgttacagtcttaggtaaattaggaaattctctggagggaattcgcaaaggttttaattgcctacgcgattttacttccgttttgttagaacaatttggaaatgcttttgaatacatttccggtaagagaacgtctttcttccgtgatcttgcgtgtgcagttaaagtagatatcgctcgatggacccaggatgcacgggaaaccattgagtattttgaaatttcaggttcccttgataggtatgagtattatcgtgctcgtgagcttatctatcaaggtcaagatttgatcgacaccgccaacaaagctcgtagttcgcacacaagtgtaaaattcttgcgaactattggcaagttggttgaggaactaaaagaaattcgtgctaagtgtgcacgaagtttaaaattcccaggatggcgtcgacagcctttttgggtatattgttttggtgagagtcaatgtggcaaatctactttggcaaattatttgatgccattgttgatgtctcacatgggttgggatcctcaggatgtttacagcaaggatcccgttgatggttactggtccggatattatcagcagaagggtttaaagataaatgatttatctgctgttaattccaaagatgtagcgcccctcgagcagcagttgataccattgatatccactgaggagaaaatggtgtcttcggctgaaattgaaggaaaaggaatgcagtttgcctctgaaattgtagtttcttcatccaattttaatgatgcaccaactggtgctgaaattttggatgcagatgcttacagacagagacgaaaggttttgatgcgctgcagaagggctgctgagtgggttcataatgctgatggtacgcgcacagagaagcttgatgctgagggcaaaattgtatataagccctatgatccatccaatgctttatcttgtaccgaggtgcaatggattcatcctgtttcatttacagctcttcccggaccctgtgggcagtggcacttagccgagttcaccatacctatggtgaaggaggctatggatgcccactttttgcaagaagaaacaaagatggcatcctggaagtcgagccttggcatgaagagtcaaacagcaaggaaaatgggttcatacttgcaggatatgattaagggtattggtaattttgttacccttaaaggagcaaaagattcagatcctcgttatttgctggtagctgttgatggaaaatgctatgcgttagaccagcaagggaaagccactccttatgaggattgtgatgttgttgaagaaattgagcggctaactttgttgcaataccgctcttatttcgcggacttggtaatggaacatgctgacaatacatattatcaagattcattccattcatcaacagtccgagattttttgttggctctaatgaaagatgggtcaactgttttgtctgtggatagtctgggtagtagtactcaggacattcacaaagaattatgggcagaattgggactttcagaaaagatttttctgagggtttcacaaatagctcgtaatcaattgcgcgatgctccacattttaaggaagacgttgcgcacaattttttggaaactatgaggcatcttagggatgctattgtagatagaaaggaacaaattcttttattttttgcagcagtagctttagtgggcttgtttagttggggttttttgagcctaattaaacaatttgcttgtggttctttaggatttggtgctggcatcgcattgcgtgagcaaattgctcatagtagtgttatgtcttcaggtagtgtgactagtgcctttgttgcacgcaacatgccagttgtatggggcaaagctgctaggtatgccactgcacactcaagcaaagaagaagtgggcgccaattttgattattttgaagatgctagtgctcatttgttagctcgtgttgttggctcatctggtcagtctgagacctgccttttatttggtcatcaggctattgcactttgtgcgcaccagttgagattgtttcctgacaatgacagggtgactatccattatttttcaaaggagaggcgccctgtttgtttttcatttacttggcattatattaatgctattgagtggcctgactgtgaagtaattgtatatagagatgcacagctcacgccactccctgtatatagtgatgataattatttgtgtggggagcaaacattgcccacagttttaacgataactgggctctcaattaagaagaagaaattctttgatgattccacgttgtgcccaagcgaaaaaattctggacggtgaaatgcccatcgtccggagctggaaagataccgcttctctgagaacgcaagtccagacaattttgtccgagactcatagaagagatataaataggtattatacttctagttacccatcagggaaacatgatagtggaggtataataactgcagttataaatgggaagcgtaaagtgataggcatgcactgtgcgggggcgcaaaatgggaaaatttatgttagtaccattggtcttttgcccacccgcaacattaatgatgcacactctgctgccgattattttgttccaagtattggcagggaggaaaaaggattttgcaagattggttggattgcagatccttcaaagagaccacatgctgccactaagactgcattggcaccagttcctaaggaattggctttgccattgccagagggagtgtctgtaaagattccttctattttaagtgcagcagatccacgcctgcgtgatgaggtgaatcctgaatttaaggattatgatcctctacgcgtaggtatggataaatttgccaaccccatggatccgcttgatgatgaagttttacagcgggtctgtgaagatatttatgaaacctggtatgactgtttaccaatactagatgatgagaaggtcttcttgcaaaagacctccttggaggtggcgttgaacggtataccgggtgaggcttgctatgaagccatgaggttggatacatctgagggttatccttttgttttagaaaggaaaccaggggagagcggcaaactcagttatgtacatattgatgagaatggcgttcgttcccttattcctggtacatcggtttttagagattaccatgaattgtcagcaagtatactgacccaagtgcctgtgttgaattgcattgaatgtcctaaagatgagttgctaaaaccatctaaagttttggagaaaccaggcacacggcttttcgatgtactcccctttacacataatattcttttgagggagtattttttaaatttttgtgtttttctccaacaaaatagggtgcatttgccctgttctgttggtgttaatccatattctcgcgagtggacctggctttttgataggttggctgcgaagagtgataaagctttgaattgtgattatagtaaatttgatgggcttatatcacatcaagtctacatgcacatggttgcaaccattaaccgactctttagagatggtgaggaagcaaattgtgcgcgtaagaacttgtttttaatgtttacatcacgcaggagcatctgctatgatcaggtttatatggtcaaaggtggaatgccttctggatgcgcactcactgtaattattaattcaattttgaatgaaattttagtgcgctatgtctatagaataaccgtcccaatgccagccaaaaactattttaataaatacgttgaattggtggtatatggtgatgataatttaattgccatacatgatgatgtggtctctttttttgatgggcccattattaaggaaaaattggcagaggttggggtgaccattacggatggtactgataaatcatcacccaccttgttacgcaaaccgctggagtctcttgattttttgaagaggggctttaggaaaattgaagggggaatgtattcttgccctctggataaagggtccctttactcccggttatattacagtgctggaggtaaagggggcctttttcaacttgatatcctccacgataatgttaaatctttcttggaggaactgacgcatcatgctgatcattatgaagagtttcaaagagtgcgcagtttttatattaagcgtattccttcatggtcagctacgctgcctacctatgctacatgtctgaatatgatggaggggcagcggaattcagcaacaccctggcaaccacataaatttatagaaacgcggccttcaggttgcgaaactaaaatgatggcgggccaggataatcatgctcagaagatatgtgtaactgagcgtataattatatgtggtgaaaaatatacgccaccaatactggagacctcttttgttgtttcaatagacaaccccctttatattggtgaaaggggggagtatgttaaaacagagtttggttcaggtatggggcgactgcctactgatgcctggatcaaagctttctccagtcccaagaagcacccacagctttttgaagcttataagatgggtgctactatatattttagatcctgcatgccctatttaaatgcatggtgtgcagtgtgtaagtttgcattggctcatggaatcgatcagagttctattattgctatgtatgagtcatgcaaaccaagaggggcgggcgacattgctcctcttgtggccgtaaaggcatacactaaatttgtgaacagaccagtgtttaaatttaaagagactgttcataaggaagtgctcgaagcacacaatagtgtgcgagtcgcctaa

SEQ ID NO: 2779 - DNA, 19296 bp, Citrus tristeza virus
  source 1..19296: mol_type = other DNA
aatttcacaaattcaacctgttcgcccagaaaatacgtctggcacaacagggatccggaataggtccagcctttaagctctaatattcccacaacaaaaattacactatgtcgaaactcagaggaagcttctggtcttcggccatcgctgttaacagcgattacacgatatcgcgcatctggcgcaaacttaacaccatagtagtcctgcactactttggttttgttagaatcaccaaggtgattcgtgacaaatcggctgatatgccgatagtccctttacggaaatctgtatttccgttttctgttcgcgcggctgtcacgagcttcgtgctgctgggcgtcctcttgacgctccgcattcagggtgcctctgtggccttcccgttatcaacgcatctggcgttgttcgtccccgctctgttcgcgggtttttcgaggttttctctgtgcaaacctccgctcacctctgccgctaagaggtccctccgtcaggcaaagcgggaatctgtttccctttctagccgggcctcttctcgcttctctagggaagtccctcgcggcacacgttcaagacttcacagacgtgtggtgagacgagctgacactgccccagttgagagtccccaagacaagcctacccgacgaaacagccgacttggtaagacttctcacctcccttacgtgggggaggcagcgttggatgatatccttcgctggatcgaagaggttaatcctcatccctcgatggtcgctattccagtgcccatcacttttggaaccatgcctgcaacggcttggtgttcccactctgaagccgcagttttgcgtgccgccttgactatcacgcggctgaaactgatttctccactcaggagaaacacgtacggtacgtctataatgacgtatcttctgccactaaccgtccccgtacggtttctccccgcaagtgcgtccatttttcccagtaaatctaaactgggcgttgaggtcccctctggtagggaccttcacactgcgttcgtgagatcttctcacgcgagcgctttcttctctgacgcggttcgcgcttcgtttgttccgtccagcgcggaacaattttttcacttccgtcgtcagcggacgcatgttcttgctattacagacccggtcctgtgtggtacggtgtctgttttaatgtcggacggtgttaacacagcacgtctcgacgttgttgctccggcgtactatgcgtacgctgaatctttgggcgccagagtgcgctttttgtgggagtcgtccgacgtggacgacgctaaagttcgtgacggtcaatgttatgtccgtcatgtgttcgacgtggctctctactttgggagacgcgccgacctttccgtgcgtagagcgctgggtatgtaccccacagtgggtgcactaaaggcttatcttgttcgcgaatacggtcgcgactctcttaaggttcctatgcgtgggacctacacttttggcagtgtgtttcactgcttgtcgctaaatcttcaagtcgacctgcgatctattcctaaccatcatttagttggtgggacgtctgcccacgtcttaattgggcaggttcgagtcagtgttcctggctcgattgttaaaccttcacgttcggccgttcgtaggcgtaatagacgcatgcgacgtgatggttttctcggtagttccggttcttcttcttctgcgggggagtcgactcgctgttcggactgctcttctcctcgcggtttaccttctccttccgttttaaaaccttccctaggtcggatcccgagtatagatcggcggttccggtttcctgcgggtacgcagttgcgcgtctccgtacctaggcgggtcgatgaccatgtttacgtgtcgactggtagcaacttcgatgagttgtgccatgcagttttgacacgtatgtcaaaaggtacaactctagaaatccttttacactcgattcgagagcggaagggactacttggttttgcggcgtgcttccgttgggggtcttcacacgtgtttgtaaagcgtggcaactttactgcccgatttcctatttcggcggtcaggtatgagaatcagtatgccgcggttatgatggatgtggggactagttgggttccgaagggctacgttcccgatgttgatgttgtgaaacgtcggagaagtcgtaatcgtcgttttcctctttcccatcgtgcggtggatcagtcggtccccgcgttacagtcgagtcctgtcgaggttgcttcggtttcgagtgataagccttcatcgtcgcagaaggcttcttcaccttctacttcttcttcttcttcttttaactcgacaaggagttcagactgggtgaatgtcggtttctctcatcgaactactaataaggttcgtgaaccgcgttatgctggtcatcgtaggatcggaaattttactttcccgaggggcacagtgtacaacacgcctgtcgatgagcgcgcctataaacgtgttcttagattgcgagataccacagcctgttcctttctccgtatactgctagctcgtttgtcgggttacagacctttaagtgacgagttctttaacaagtgtgtcacttcccggtttgtcgcgtgcattgaacctgtggaatcaggtctcgttaaggtgcatttccgttctgatgttttccgtgcctctttcccgtttgacggtcaacctatacaccccgccacggctttgacattggaagtggtggtctcttgggattggatggttacggcttttcagaatcccttgaaggatggatattgctacattcgccatttcgccgaagttagtttgagcatggggcgaattttcttcaggagggacgtcgacttgggacctttcccatacgttttcgaagtgcaacaccgtcttgaaaggttgtacgggaaagctgcgttaagatacggtgttaggggtcaatattcagccccgcgctgttttcactgttgctacaacgattcaccgagaccgatggcgtcctttaatgggtaccataagatgggtggtgaagataactccctgataatcacagacaccgacaggttgcgtgctgtggggagtgcctatgaaaaagtgaagagaaacataccagattcgttattggttcggtctgtagaaaaggaccttatagagtttaatcagactctagtcgacatgcatcgatccagaccgggcgttgtcgtacctttccaaatgagtgagaatcagcaagtgatgcttactagggcgtacccggaatttaatattaattttattcattccgtacattccgatcatccggtggcagcaggttctagggcgttggagaatcatctcgttcgtaaacacgctggtaccgattattcggatgtggggggttgtccgctgtttcatttacgtgcgggtcactccggcgttcacgtttgtagaccggtgtacgatgttaaagacgctcatcgtagagtagtccgtcatcaccaacttagtaaggtttcgctagatcagagtgacggtgttaaacaagttggctggaccgtaaacacgaattctgtatgcggtaacattttgggagagtgttatcatgcatcggaggcgatggttatggttcaagtttatgacgtaccgctacgtgagttgtgtagggctatgataaacaagaaaacttccgtgtgttatatgaccatggttacacctggtgagttgttggacgcccgcgagtccttttttattaaggacttggattgttcggttgagttagatcccattgcagacagggttgtttactgtttcaacaattctgcgtatacacacacgtactccactatatgtgagtgtatgcgaactccttgcttggtagtggacgggtttttgtttactatcgaaatggtatcgctcaggtgtagcgttaattactattgtatcaccaagtcgtcggtctgtccgagaattagtgagactaagcggttgcgctaccgtcggtgtgatagcgacttgattagaatcaaaattccccggtactccagtaagactcgtagttgtttacctgggtgttactatttgtacttggacgccaagtttgtaagtcgcgtgtacgagtacgtggtcaataactgcgttgtggtgaacgcgaaaacttttgagtggacttggaattacatcaaatcttgcaagtcgagagtggtgatcagcgggaagattatacaccgagacgaaccaatcgctttagagtacttagatgggttttctgcggttatgctgtccgctggcgtgaagggtaggcaaaacgcggacgtttctagacgcttagccgctttttcgggtgaaacttcgattttcgagttagtggggtttgctatatccgagaagtgccgcgacttgttcttgggtattcaggacgctgtggaaagatgcgtgaagtcgtacctcaggaattcgtttaatatgagtttcgtggacttgtccgaccccttacttacgattagcgaatattcagaattggacgttcctatcgacttaccgggtttcggtggaatagtggacggtaacgaaactagacttatggaagacggtgttaaatcggctttattacgtaaagcggttcaagccgaggctcagttgagtcttaagagaggcaatacttccgaaatcgttccgtgtgatgacgatgacgactcgaacggtgatgattcgcgtgtttcgctcgatacggactggtggttcgtccttcggggtggtagttctggcgggttgcgagctggagccgccccttctttgtttaggtgtttactcaggaaattgggtgggggtttatgtttggcaaagaaagtgttggaactgttagtcaagcgggtggttgaatcgttttctcgtttgaagcggaaaaccgctcgtttaacgtccttcgctaatttgttgcttgcgaggctctcttgcgggtttttcgatgacactgttttttctgcggtctgggaaatagcgatcaacctgaccaggatcgtcgatggagtagtcaagacaaaactggggtgctttcgtaatttatttcgattgattcccaagttatacgctggttgtaaggacgttgtgaaggacgttagtaacgcttacaggtcggttgtctcgttttccgctgaggttttgggtaagagttactctaaactttgtcagttttgcttggaaatatttgacatcgggcttattgaggtttctgctcgtaatttgggactggaaacatgcgtttcaatagcactagctatttttgatgtgttgattacttttcctttggggagcgttagttttcccgtcgtttgcgctagggttttcggtcgtctcgctatggaagtgggatcgaactttttgtttaagaaagttttcggtaaacccgaaactcttggtgaagatactttccgtaggactgtgagtatggttttgaggcccaaagcgtttgacaagctttccgtggatgcgaaaggtttagttaggtgctctggtgttattcctggagtgttaaggataatactatcttccttgttttccgaagatgacgcttgggtgggttatagtaaacatgaagtttcttcccttcctattgttaccttttgtgtgaagagattgtcttattctctggagcggtgtaaggaagcgtgtgtcgcatttattgttgactctgctaagaagattttgaaatctttaacttcagagttcaacgaatccattcaaaactccgacttgaccagtggtgctaagtccttgtacgggcacgtgagctcgatactttacacctctagtggtgtgattaataaagcaggaagcgccgtcgctactgttaaagcggtcgggagtgatatcagtggtcgtgtgaaacgtatgcgaccccgattttctctgtcccgtcactttgacgagcagactagtgagtactactctgctagcgattgttccgaactagatgagtcgttgtttagtgaaacgcctggtcttcgtggaaacgccaggtgtagagatttgtttcgtatcgtgtctagacgcgcggtagcgtgttgtgagtacgtgacaattcttttgaaacggctagcgtcgcgtgccggtgaatactcctactcgtatgtgatggatacgctcgtgagattgtatgtggcgaccgatgatgttgttagacggtgcaggtcctttacgttcgactgtactgataaagcatctaatttcgtcaccgggtttcttagttggcgcagcttacgttctggtgcgtactctgcaactccagggttgggtggtggtagtagaggtttaacgtcgttttctcacaccggtggattcacgcgcgttatcggcgctcttgggaacaccttatcggtggtgtttgatgaggaattcttcagaactttgctgcatcggttgagggcagatgttgtggttttactggtggagttcttgaaaaaccttcccgtttgtttgttttcaatatacacttttattgaatgtcggggtaggatctttcctttaagagagttcctatggggtttttgtcgtttcgtttgggatgttatcgaggggttgtccatcaatacttatcaatacctctctgctgtcgctgagaaagtgtatcgaggtgcctttaatcgtcgatttaacgaagaggatgagaggacgcttcgagtgatcacggaagcagagggaagaatcgaatttttgcgagttgttctcgcggaaatggaaaggttccgtgctgcgtcgaacgaggtttcttcgtcgaggtcgtctgatagtccttcattcccacctacttacggtgaaattgaggagttaaatgatgattcctccgatagtgcgctagtgataggcgtcgacaacggtaccggccgcactatcgttgacggtgagaccgattctgcgtccggtagcgatagtgacgtttctatcccgttggatcgcgattttgaacaaatcgggcgtcttggcggaaacggtaacgtcgatgtcgttcggctgggtttgaaattcgttctgaagttgttacgcaacctattcgatgctagaagttttaaagtgttgtatgggttgttacttcaaacccttttttatggtggttcggtaaataaatttgtgtgtcgtctggtctttagtcttgggacttgcttacctttcgagttactccgatttgcgtgttcagcgaggcggttgttgaagagtttggcatcatttgtttaccagactaaccttttcagcgaagttatggtggagcatttgtttagcgtttcccgactgctttatgattcccggtacttcgcgactgtgttttcggaattggagagacttaacttctatttagactatttcctttcgctcccgaagagatatctattccctaattctagggctcgtagttgtgctagggttccggttcccgtgattaggaccgaaggagtggcaccagtccgtgagagatcactaaatgacatactggactctttagactctttaaaggtgtcggacctcaaagggaagtcgacgttcgttgatgatggggagtcggattccggtagtgaacattcgggtagttcgatttcgttcggttccgtcaacgaagaagttttaaatgcggtaaatggtgacagcgtttgcgaaaaagccccgttgatgaagcatgttaccgcacttagcaggttggaacgccaccctagtggtcgtaaagacattcctgtttctaggaaaacttttgtgcgtggtgaatcttcgggtgtgaaatcgaaggtgagtatgtgcgattacttggtgaccttgaattcttcgtttggcacagtgcctgacatgtaccctgttgcgcgtgacataacgtataagaaactgactaacgccatgcgcgaattctattactcgcaaaaaataaccttgtacgaacttcacgggaagttgagttcctattgggacgagttgaaggtcgcaggtttcgatagaaagttaacgagaatggatttggacgatgatgtctatgttgttgactttaatcggaaattgttggtggggagaaacggatctcatccgtttcgtaatacgttaaagtcctattgttttatgttttgtaacgatgggttggttccttgcccgcgttctcagaaatatgattatgctttgatttctaatcaaacgtcttttgttgccgcgaattcgttcttacgtgccgtggatggtaaggatttgacttttaccaatgaggaacatagccttatcgtttatgaagctcctcccggtggtggtaagactcattctttggtgaattcgtacgcggattattgcgttaaagtatcttgtttagtagtgaccgctaacaagaattctcaaaccgagatatctcagcgcatatctaatgaattgatgggcaggaagctagctgctaagtatgttaccgatgcagcttccagagtgttcactgtagattcttacttaatgaatcacttgcgacttacgactcaactgctgtttatcgacgagtgcttcatggttcatgctggggcaattggagccgtggttgagttcacgtcttgtaaagcggtggttttctttggtgatagtaagcaaatccattacattcaccgaaacgatctcggggtttcctttgttgcagatattgatgcgtttattcaaccggaacatcgtatttacggcgaagtgtcctataggtgtccttgggacatttgcgagtggctttccgagttttacccgcgacacgtagctactgctaatgtagggagtattgggaagtcgagtgtgtcaatagaggaaatcaatgggtgcgatgacgtaccttacgacaaggcggcgaagtacattgtgtacactcaggctgaaaagaacgatttgcaaaaacacctcggtcgcttaaccgtgggtcggaacaaggtagtaccaattgtaaataccgttcatgaggtacaaggagagacctataaaagggtacgtctggtgaggtttaagtatcaggaggataccccgttctcttcaaagaatcatattgtggttgctttgactagacatgttgattctttggtttattccgtacttactagtaggaggtacgacgatactgcgactaacatagatagggcgaaggaaatttttgacaaatttcgttcgtcgaatcactcgtacggttcgtcatcgttagagtggtaccttgaaaagtatcctaccgaatataagggtagtaaagcatcctctgctccgataagttgcattaacgaatttcttaatgaggtcgtcgttggttcttctgtcgtgcagttgggtgatgtgtctgaagaactaagttcacgtccctttgaatcgggttgtgataatgttactgtaagagacaccgcccctcctgactcgggtaacttacacgaaccggctcgcgttcggcgtagtaaggtcacaagcaattcctccaagaaaagcgtcactgcaagaaaaccttctgtcgtacgaaagtcgtaattataactttatcaagacggaacggtttgttggaccaagcgaatttggtagggcgatggctgctgctgttatcgaacgttgtttcaaaatggaagagatggctaagataaggtgtgatattatatcccttactgaagctaacattttaaaatggctcgataagcgcactccctgtcaaataaaggccgtacacggggagttgaaacttcccttttcggtggaggagcaaatttccaacttcaaactgatggttaaacgtgatgctaaggtaaaacttgacgattcaagtctatctaaacatcccgctgctcagaacatcatgtttcataagaagtttatcaatgccatattttccccgtgtttcgacgagttcaaaaatagagtgttgtcctcgcttaatgacaatatcgtgttctttactgagatgacgaacgctgggttagcggaaattatcagaagaatcattggtgacgacgacaacttatttgttggggaagtggatttcagtaagttcgataagtctcaggatttgttcattaaagagtacgaacgtacgttgtattccgagtttgggttcgataccgaacttctcgatgtgtggatggaaggtgagtatcgcgctagagccaccacgctggacggtcagctgagtttttcagttgatggtcagcgtcgttctggaggttcaaacacttggattgggaattccttggttactctaggtatcctttcgttatattacgacgtttcgaagtttgacttactcctcgtttctggagacgattctttaatttattcgagtgaaaagataagcaacttttcttccgaaatttgcttagaaacaggttttgagactaagtttatgtctccgagcgtgccatatttttgctcaaagtttgtggttcagaccggtaacaaaacgtgttttgtgcctgacccttataaattattagtaaagttgggggctccacaaaataagttaaccgatgtcgagttatttgagttgttcacttcttttaaggacatgacgcaggactttggtgatcaagtggttttggagaagctgaagttgctagtcgaagctaagtacggtttcgctagtgggaccactatgccagcattgtgcgctattcattgtgtgcgatcgaactttctgtcctttgagaggttatttcctttcattaggggttggtatgttgttgacgctctaaaactcagacagcttaggaaactcactaatttgatctgtgaacgtgtagtttacgacaatcgggtgagttatttttcgtacttcgataacccgttcactaaacctgacgctaacgacgataacgtggacgacctcggacaagcgggtgaattagcaaccggctgatcgattgattagttctcgctgagagctaatgtgggtagttgagtcaggatgtttgccttcgcgagcgaaagccaagacttgttagaagaaaaagtttttcgtcgtagaacttaccatcgtaaatattttggtgacgtggttaaggacttcactatcgatattggttatgatactaccgatcgcgatcctactgtattggccgattatttctcattgtatttctttttacttaacaacgatagtgttgggcctatagcagcctcaattgtggtaagcccaccggttagcgggactcataaaattcgagcgcatatcgataatcaaccgaactgtgaaggtaacgtgacttacgttaaaaccttcgacaaaagtcgctttgtgattcgcgttaaagcgtccccgtctatgagaggttactactcttttcgggtgtttcttagtagcgatgtcgctagcgaacgcagcgagttcgtgtgcagttttgttggtagcaggtttctttgctgttgtacacaaacgatatctgaaaatttgagtaaagtttgttcatcttccttcttcttcagagcagtttcagaaaccgcgaccaacgaattttctgttgcgactgatgatgtggaagacgttaagtacataagaaaacaagccgagggtttttcacgttgcgctgacccataccctcctaggtgttatcgtagcactaatttgggcgattcttcaggggttcagagtcgtacgattgaagaggaaggttatatgacgggcactgcaggtaacgtcgcagtcaccgtcccgaatactccactagttagtgctgtctctccgtatatcgcagggtacaacgagaatgcacgctcgcgcgtctcattaatacgccgggtctgttgttacgccgtttgcgttttagtggtgtccgttcttataatgagcggtttattagccattatatttatatgatttagtgtagtaactcataaggtacaattacttacttaagactcgccgtttgactctgtttaaacggggtttaatggactgcgtaattcaagggtttttaactttcctagttggtatagctgtgttttgtgcctttgccggactgattatcattgttataacaatttatcggtgcacgattaagcccgtcagaagtgcttccccttacggcactcacgcgactgtctaagcggtatggtgcttttgggtttagacttcggtaccacgttttcaacggtggctatggctacaccttcagagttagttatactcaaacaatccaattcatcgtacatacctacgtgtttactcctgcatgcggaacctaacagcgtatcttatggttacgatgcggaatatttagcggcttctggggagtctggttcgttttacaaagatttgaagcggtgggttggttgcactgcgaagaactaccaaacctacttacacaaactatcaccttcctataaggtgatagtgaaagagtttggaactaagagcgtgccggtgccatatttgtcacctctgaataacgatttaggactcagcgtcgctttaccttcactgattgcttcgtatgccaaatccattctgtcggatgcggaacgagtgttcaatgtaagctgcactggagttatatgttcggtacctgctggttataacacgttacaacgagcttttacacagcagagcatatcgatgtcgggttactcttgtgtgtacattattaacgaaccttcagcagccgcgtactccactttacctaagttgaattcggcagataagtatttagccgtttacgacttcggcggtgggacttttgatgtctctatagttagcgttagattacccactttcgccgttagaagttcgagcggtgacatgaatttaggcggtagagatatcgacaaaaagttatccgataaaatatacgaaatggctgattttgtgccgcaaaaagaattgaacgtttctagtttaaaggaagctttatctcttcaaaccgatccggtcaaatatactgtgaatcattacggaatgagtgagaccgtatcaattgatcaaacggtgttgagggagatagcctcggtgttcataaatcgaacgatagatatacttacgcaagttaaggttaagtctagtatgcccgaatcgcaaagtttgaagttagtggtagtcggtggaagctcgtacctaccagggttgttggacgctttggcaaccgtgccttttgtgtctgggatagtgccggtggaagacgcaagaaccgctgtcgccacagggtgcgctttgtatagcgagtgcttagatggtaggtctaaggccctactaatagattgtattacgcatcatttgtcggtcacgacgtttagcgcggattcggtcgttgttgcagcggccggtagtccaattccttttgaaggtgaacaaaaactcacgttacgcaaatgcgttagtacgtctaactatcaagcaagaatgttcgaaggggattacgaaaaagttttccgaaatgaacgtatatacgcagcttcgatatcattgtttacattaggagttaattggagtgtgcctaacgacgttgagatgactctcgtgaccaaagtggactcgatgggtaaagtggaattttaccttaaaggtccatctggtgaactggttaacgtgcaaggtacttcgcattacgattatgctggtatgcctcaccccactagaaagctggtgaggcttagcgattacaatgtaaactccgccgctttagttttagctttgacattaactcgcgaaaaacgagaaaagttccttttgcgaacattatttgacactttactagcggatttacgaaagacagcaagtttaggcgagtactcaaagaagtacccgatcactcgaaacgatatcgatgtcgtctcatcacgtatggggatcgttgtttcgaaagttttacggggaagcgatttggaaagaatacctctctgaatcaactcgaaatttcgatgaaagaaatgtatcgttagaccacactttgagttcgggtgtggtcgtccgtaggcagagtcttttgaatgcgcctcaaggtactttcgagaacgagttagcgctattgtacaattcggtggtgattaacgattttgttgagttgactggtatgcccttgaaatctttgatgacaggtatcgaagaccgtaaggtacctgacgaattaatatccgttgacccgcacgaagtcggatgtagattcacgttaaacgacgtggaatcgtatctaatgagcaggggtgaagatttcgctgatctagcggcggtcgagcattcgtggtgtttgagcaactcttgtggtagactattaagttcgactgagatagatgcttacaaaaccttggtgtttactaagaattttgatagtaatgtatccggagtgactactaagttagagacttatctatcgtactgcatatcattgtacaagaaacattgcatgaaagacgatgattattttaatcttatcttacctatgtttaattgtttaatgaaagtgctggcgtcgcttggtttgttttatgagaaacatgccgacaatccgctactgaccggaatgctcatagagttttgcctagaaaataaggtgtattactctacttttaaagtgaatttagacaacgtcagattgtttaagtctaaagtgttgcctgtggtgttaacggtttgggatatatccgagcctgatgacccaatggatgaaagggtgctgattcctttcgatcctacggatttcgtgctcgatttacctaaattgaatatacacgatacaatggtggtggtgggtaatcaaatcagacagttagaatacgtagtcgaaagcgatgctttagacgatctatctcaacacgttgatttacgtttagcagcggacaatcccgatctacgcgttggtctgcgttgggcagggatgtttgtgtactacggtgtttatcggtgtgttgttgatagagcggtggaacgaccgacgttgtttagattgccgcagaaactactgagtcaggatgatggcgaatcgtgctcattacacatgggttccgtcgaagctttattcaatctggtgcagaaagtgaacaaggacataaacgttagacgtcagttcatgggacgtcatagtgaagtggctttgcgactgtatcgcaacttaggtttgaggtttccaccgatctcatcggttaggttaccggctcatcacggttatttatacgtcgatttttacaaaagagtacctgacggtgctgttaccgccgacgaactcgaaagtttacgtcaattacgctcatccgtggacgttatgtgtaaggacagggtgtcaatcacacctccaccattcaatcgacttagaagaggttcttctagaacatttagaggtcgaggcgcacgcggtgcgagctcgcgtcatatgagcagagacgtggcgacttccgggtttaatttaccttatcatggcaggttatacagtacttcctaaaaccgatgataaagaaatggatcctgtgagtgctgccgtgcccggtaagtatccggatgtcattgaaaagttcgtggccaataggtccgtagatgcgttaatagaaggcgttataagtaaattggataccaattcaatatacgaagattccactgaaaagtttactggtgaacacttgaaatacgttatggttactatggacactttcttattagaaaactacaaaacgaaaacggaagatctgttggttcacttaactatgatccaaaagaggttatacactatatccacgagcactaaaaccaagtttcgcgataaaggttgtattagttacgtacaagggggtttacgatataagttgttggacaaagtagtttttcctttcattatatcgaaatttaccgacagggagactccaaacgctctacgtaagtttgcttgcactttcgaggagttacacttgtgtatggctaggttaagacccgacttatacgaaaataaaaggacgaccagggctgggactccacatttaaagggctacctatcagctgactttctctcaggttctctccctgggtactccgaacatgaacgaggtatcattcttcgagcgtccgagtctatgttagctagacgtcaaggttacgaggaggcgaccgagcttcttaacctacgcgatttgggtaagtacttatagttggtttggggacggtaacattatactatcccatgagcgctgccttaagggtcgttaattgacgacttttgatatatttactaggtttgaattatggacgacgaaacaaagaaattgaagaacaaaaacaaggaaacaaaagaaggcgacgatgttgttgctgccgagtcttctttcagttccgtaaacttacacatcgatccgactttgataacgatgaacgatgtgcgtcagttgagtacccaacagaacgctgctttgaacagagacttattccttactttgaaagggaagcatcctaacttacctgataaagataaggactttcgcatagctatgatgttgtatcgtttagcagttaagagttcatcattacaaagcgatgacgacgccacgggtataacgtacactcgggagggtgttgaagtggatttgtctgacaaactttggactgacgtcgtgtttaactctaagggtattggtaaccgtactaacgcccttcgagtttggggtagaactaacgatgccctttacttagctttttgcagacagaatcgcaatttgagttatggcggacgtccgctagacgcagggattccggccgggtatcattacttgtgtgcggatttcttgactggggctggtttgactgatttagaatgtgctgtgtacatacaagctaaagaacaattattgaagaagcgaggggctgatgatgtcgtagttactaatgtcaggcagcttgggaaattcaacacacgttgatctgttgcgttccgattcccggtttctatcgggatggtggagtttcatcgtgaacgtgggtgatataatcgtccggttcgcgttacacgttcctaatgaagatatgctgaatagtttttcagctatatcgaattgtacgattatagcggacggtagtgctttactaaaagataatactgtggtcgatcgtttagaaggcatgaatcctttggcttatttattaaaattagcgaaaacgactactactatttgttttactatgtctaataaggttctttttggtactactaaatccgaaccacttagttgtttagctatcacgtcggatcgagttttattcaaagttgttatgggtactaacgttgacgattctcgatgcggctgcagtatttggttttacaacaacggtacgtttcaaaatggattgatccgttgtaataatctcgtcactttgtttagcgtgacttagacacgaagtgactgttcggattcaattgctgcaatgagcattcggcgctcgtggttaaaggttatggctgtagttacggtattatggtacggtaaagagccttccattagtgaaggttacaatgctctcatgaatgatgactttaagtttatcgatacgcattttacaaacgtttcttacgctaagaaatgttacgatttggctaatttcgatttagactttctacgcatcgttatcattcctttgagtgggggtacggtgaatgaatcgcgtgctgatcgcactaacgtttcagaaattgtcgaatcgcatgtgagcgaccgagacaggatgagcatcttgttgcgtaataagcggatccaaattccttcgctcttaccttgcgataactagagtctactcagtagtacgtctattagtataacgtattaagcactttagtaaagggttttgtttaaatcaaacaatatgcgagcttactttagtgttaatgattacataagccttttggctaaggtcagcgctgttgtggaacgtttatgcgatcccagcgtaactcttgcggaagtgatggacgaaattaatgactttaactcgtttctcgctttagtgcactctatgaagtcagacatgaacggagaccatcaggatggccaccacgagatgggtgaacacaagtctcggttgttatgcaacatagaggcgaaattgcgagtacttctcgacatcataagacgtcggttcactcgcgacaagctgctctgtactagcgcgacagatgtcatgggcttctttgtaatgaggtacatgagttctagccacaccagcttcgaatccgtaatgaggacggagttgaggttggtggttaaggcggtactgtcggatttatcccgcgcgcataaactggattttagcgagcgagcttttgcggcttatggtatccttttgcaaaagggtactgtgtcgaccgtttgcggtcagtttgacattaatttagtctctccatcttgcgtgtaggttaatacgcttctcagaacgtgtggttgtattaactaactttaattcgaacaaatatattgtgaaagtctgcgagttacaatggataatactagcggacaaactttcgtttctgtgaacctttctgacgaaagcaacacagcgaccactgacgtcgaacccgtgagttcggaagcggatcgcttggattttttacagaaaatgaatcccattattatcgatgctttgatacggaagaatagttatcagggcgctcgctttcgcgcgagaataataggagtgtgcgtggattgcggtagaaaacacgataaggggttgaagactgaacgtaagtgtaaggtcaacaatacgcagtctcagaacgaggtggcgcatatgttaatgcacgaccccgttaagtatttaaacaaaagaaaagctagagccttttctaatgcggagatatttgcgattgatttggttatgtacaccaaggaaaggcaattggctattgatttggccgctgaaagggagaaaacgagactggctcgtagacacccgatgcgttctccggaagaaactccggaatattataaattcggtaggactgctaaagcaatgttaccggacatcaacgccgtagacgttggtgataacgaggaaacttcgtcggagtatccagtgagtctgagtgtttctggcggagttctccgcgaacaccacttcatctgattgaagtggacggaataagttcctcgcggaactttgtgttgggttggtaaagacccttatgatggtgatatatcactagacaataaccggatgggtaaagtctttaaaatgatcgaggggaaaattaaccgtatcctctcgttggtctaagctcccacagagtggtagtggtctcaagtgaggcttaacgtatgcgtgaaccaaagaagttctccttagagtgtgtgttgtttacccaacgcactgtccctatggggggccaacataggtcca

SEQ ID NO: 2780 - DNA, 10749 bp, Citrus tristeza virus
  source 1..10749: mol_type = other DNA
atgtcgaaactcagaggaagcttctggtcttcggccatcgctgttaacagcgattacacgatatcgcgcatctggcgcaaacttaacaccatagtagtcctgcactactttggttttgttagaatcaccaaggtgattcgtgacaaatcggctgatatgccgatagtccctttacggaaatctgtatttccgttttctgttcgcgcggctgtcacgagcttcgtgctgctgggcgtcctcttgacgctccgcattcagggtgcctctgtggccttcccgttatcaacgcatctggcgttgttcgtccccgctctgttcgcgggtttttcgaggttttctctgtgcaaacctccgctcacctctgccgctaagaggtccctccgtcaggcaaagcgggaatctgtttccctttctagccgggcctcttctcgcttctctagggaagtccctcgcggcacacgttcaagacttcacagacgtgtggtgagacgagctgacactgccccagttgagagtccccaagacaagcctacccgacgaaacagccgacttggtaagacttctcacctcccttacgtgggggaggcagcgttggatgatatccttcgctggatcgaagaggttaatcctcatccctcgatggtcgctattccagtgcccatcacttttggaaccatgcctgcaacggcttggtgttcccactctgaagccgcagttttgcgtgccgccttgactatcacgcggctgaaactgatttctccactcaggagaaacacgtacggtacgtctataatgacgtatcttctgccactaaccgtccccgtacggtttctccccgcaagtgcgtccatttttcccagtaaatctaaactgggcgttgaggtcccctctggtagggaccttcacactgcgttcgtgagatcttctcacgcgagcgctttcttctctgacgcggttcgcgcttcgtttgttccgtccagcgcggaacaattttttcacttccgtcgtcagcggacgcatgttcttgctattacagacccggtcctgtgtggtacggtgtctgttttaatgtcggacggtgttaacacagcacgtctcgacgttgttgctccggcgtactatgcgtacgctgaatctttgggcgccagagtgcgctttttgtgggagtcgtccgacgtggacgacgctaaagttcgtgacggtcaatgttatgtccgtcatgtgttcgacgtggctctctactttgggagacgcgccgacctttccgtgcgtagagcgctgggtatgtaccccacagtgggtgcactaaaggcttatcttgttcgcgaatacggtcgcgactctcttaaggttcctatgcgtgggacctacacttttggcagtgtgtttcactgcttgtcgctaaatcttcaagtcgacctgcgatctattcctaaccatcatttagttggtgggacgtctgcccacgtcttaattgggcaggttcgagtcagtgttcctggctcgattgttaaaccttcacgttcggccgttcgtaggcgtaatagacgcatgcgacgtgatggttttctcggtagttccggttcttcttcttctgcgggggagtcgactcgctgttcggactgctcttctcctcgcggtttaccttctccttccgttttaaaaccttccctaggtcggatcccgagtatagatcggcggttccggtttcctgcgggtacgcagttgcgcgtctccgtacctaggcgggtcgatgaccatgtttacgtgtcgactggtagcaacttcgatgagttgtgccatgcagttttgacacgtatgtcaaaaggtacaactctagaaatccttttacactcgattcgagagcggaagggactacttggttttgcggcgtgcttccgttgggggtcttcacacgtgtttgtaaagcgtggcaactttactgcccgatttcctatttcggcggtcaggtatgagaatcagtatgccgcggttatgatggatgtggggactagttgggttccgaagggctacgttcccgatgttgatgttgtgaaacgtcggagaagtcgtaatcgtcgttttcctctttcccatcgtgcggtggatcagtcggtccccgcgttacagtcgagtcctgtcgaggttgcttcggtttcgagtgataagccttcatcgtcgcagaaggcttcttcaccttctacttcttcttcttcttcttttaactcgacaaggagttcagactgggtgaatgtcggtttctctcatcgaactactaataaggttcgtgaaccgcgttatgctggtcatcgtaggatcggaaattttactttcccgaggggcacagtgtacaacacgcctgtcgatgagcgcgcctataaacgtgttcttagattgcgagataccacagcctgttcctttctccgtatactgctagctcgtttgtcgggttacagacctttaagtgacgagttctttaacaagtgtgtcacttcccggtttgtcgcgtgcattgaacctgtggaatcaggtctcgttaaggtgcatttccgttctgatgttttccgtgcctctttcccgtttgacggtcaacctatacaccccgccacggctttgacattggaagtggtggtctcttgggattggatggttacggcttttcagaatcccttgaaggatggatattgctacattcgccatttcgccgaagttagtttgagcatggggcgaattttcttcaggagggacgtcgacttgggacctttcccatacgttttcgaagtgcaacaccgtcttgaaaggttgtacgggaaagctgcgttaagatacggtgttaggggtcaatattcagccccgcgctgttttcactgttgctacaacgattcaccgagaccgatggcgtcctttaatgggtaccataagatgggtggtgaagataactccctgataatcacagacaccgacaggttgcgtgctgtggggagtgcctatgaaaaagtgaagagaaacataccagattcgttattggttcggtctgtagaaaaggaccttatagagtttaatcagactctagtcgacatgcatcgatccagaccgggcgttgtcgtacctttccaaatgagtgagaatcagcaagtgatgcttactagggcgtacccggaatttaatattaattttattcattccgtacattccgatcatccggtggcagcaggttctagggcgttggagaatcatctcgttcgtaaacacgctggtaccgattattcggatgtggggggttgtccgctgtttcatttacgtgcgggtcactccggcgttcacgtttgtagaccggtgtacgatgttaaagacgctcatcgtagagtagtccgtcatcaccaacttagtaaggtttcgctagatcagagtgacggtgttaaacaagttggctggaccgtaaacacgaattctgtatgcggtaacattttgggagagtgttatcatgcatcggaggcgatggttatggttcaagtttatgacgtaccgctacgtgagttgtgtagggctatgataaacaagaaaacttccgtgtgttatatgaccatggttacacctggtgagttgttggacgcccgcgagtccttttttattaaggacttggattgttcggttgagttagatcccattgcagacagggttgtttactgtttcaacaattctgcgtatacacacacgtactccactatatgtgagtgtatgcgaactccttgcttggtagtggacgggtttttgtttactatcgaaatggtatcgctcaggtgtagcgttaattactattgtatcaccaagtcgtcggtctgtccgagaattagtgagactaagcggttgcgctaccgtcggtgtgatagcgacttgattagaatcaaaattccccggtactccagtaagactcgtagttgtttacctgggtgttactatttgtacttggacgccaagtttgtaagtcgcgtgtacgagtacgtggtcaataactgcgttgtggtgaacgcgaaaacttttgagtggacttggaattacatcaaatcttgcaagtcgagagtggtgatcagcgggaagattatacaccgagacgaaccaatcgctttagagtacttagatgggttttctgcggttatgctgtccgctggcgtgaagggtaggcaaaacgcggacgtttctagacgcttagccgctttttcgggtgaaacttcgattttcgagttagtggggtttgctatatccgagaagtgccgcgacttgttcttgggtattcaggacgctgtggaaagatgcgtgaagtcgtacctcaggaattcgtttaatatgagtttcgtggacttgtccgaccccttacttacgattagcgaatattcagaattggacgttcctatcgacttaccgggtttcggtggaatagtggacggtaacgaaactagacttatggaagacggtgttaaatcggctttattacgtaaagcggttcaagccgaggctcagttgagtcttaagagaggcaatacttccgaaatcgttccgtgtgatgacgatgacgactcgaacggtgatgattcgcgtgtttcgctcgatacggactggtggttcgtccttcggggtggtagttctggcgggttgcgagctggagccgccccttctttgtttaggtgtttactcaggaaattgggtgggggtttatgtttggcaaagaaagtgttggaactgttagtcaagcgggtggttgaatcgttttctcgtttgaagcggaaaaccgctcgtttaacgtccttcgctaatttgttgcttgcgaggctctcttgcgggtttttcgatgacactgttttttctgcggtctgggaaatagcgatcaacctgaccaggatcgtcgatggagtagtcaagacaaaactggggtgctttcgtaatttatttcgattgattcccaagttatacgctggttgtaaggacgttgtgaaggacgttagtaacgcttacaggtcggttgtctcgttttccgctgaggttttgggtaagagttactctaaactttgtcagttttgcttggaaatatttgacatcgggcttattgaggtttctgctcgtaatttgggactggaaacatgcgtttcaatagcactagctatttttgatgtgttgattacttttcctttggggagcgttagttttcccgtcgtttgcgctagggttttcggtcgtctcgctatggaagtgggatcgaactttttgtttaagaaagttttcggtaaacccgaaactcttggtgaagatactttccgtaggactgtgagtatggttttgaggcccaaagcgtttgacaagctttccgtggatgcgaaaggtttagttaggtgctctggtgttattcctggagtgttaaggataatactatcttccttgttttccgaagatgacgcttgggtgggttatagtaaacatgaagtttcttcccttcctattgttaccttttgtgtgaagagattgtcttattctctggagcggtgtaaggaagcgtgtgtcgcatttattgttgactctgctaagaagattttgaaatctttaacttcagagttcaacgaatccattcaaaactccgacttgaccagtggtgctaagtccttgtacgggcacgtgagctcgatactttacacctctagtggtgtgattaataaagcaggaagcgccgtcgctactgttaaagcggtcgggagtgatatcagtggtcgtgtgaaacgtatgcgaccccgattttctctgtcccgtcactttgacgagcagactagtgagtactactctgctagcgattgttccgaactagatgagtcgttgtttagtgaaacgcctggtcttcgtggaaacgccaggtgtagagatttgtttcgtatcgtgtctagacgcgcggtagcgtgttgtgagtacgtgacaattcttttgaaacggctagcgtcgcgtgccggtgaatactcctactcgtatgtgatggatacgctcgtgagattgtatgtggcgaccgatgatgttgttagacggtgcaggtcctttacgttcgactgtactgataaagcatctaatttcgtcaccgggtttcttagttggcgcagcttacgttctggtgcgtactctgcaactccagggttgggtggtggtagtagaggtttaacgtcgttttctcacaccggtggattcacgcgcgttatcggcgctcttgggaacaccttatcggtggtgtttgatgaggaattcttcagaactttgctgcatcggttgagggcagatgttgtggttttactggtggagttcttgaaaaaccttcccgtttgtttgttttcaatatacacttttattgaatgtcggggtaggatctttcctttaagagagttcctatggggtttttgtcgtttcgtttgggatgttatcgaggggttgtccatcaatacttatcaatacctctctgctgtcgctgagaaagtgtatcgaggtgcctttaatcgtcgatttaacgaagaggatgagaggacgcttcgagtgatcacggaagcagagggaagaatcgaatttttgcgagttgttctcgcggaaatggaaaggttccgtgctgcgtcgaacgaggtttcttcgtcgaggtcgtctgatagtccttcattcccacctacttacggtgaaattgaggagttaaatgatgattcctccgatagtgcgctagtgataggcgtcgacaacggtaccggccgcactatcgttgacggtgagaccgattctgcgtccggtagcgatagtgacgtttctatcccgttggatcgcgattttgaacaaatcgggcgtcttggcggaaacggtaacgtcgatgtcgttcggctgggtttgaaattcgttctgaagttgttacgcaacctattcgatgctagaagttttaaagtgttgtatgggttgttacttcaaacccttttttatggtggttcggtaaataaatttgtgtgtcgtctggtctttagtcttgggacttgcttacctttcgagttactccgatttgcgtgttcagcgaggcggttgttgaagagtttggcatcatttgtttaccagactaaccttttcagcgaagttatggtggagcatttgtttagcgtttcccgactgctttatgattcccggtacttcgcgactgtgttttcggaattggagagacttaacttctatttagactatttcctttcgctcccgaagagatatctattccctaattctagggctcgtagttgtgctagggttccggttcccgtgattaggaccgaaggagtggcaccagtccgtgagagatcactaaatgacatactggactctttagactctttaaaggtgtcggacctcaaagggaagtcgacgttcgttgatgatggggagtcggattccggtagtgaacattcgggtagttcgatttcgttcggttccgtcaacgaagaagttttaaatgcggtaaatggtgacagcgtttgcgaaaaagccccgttgatgaagcatgttaccgcacttagcaggttggaacgccaccctagtggtcgtaaagacattcctgtttctaggaaaacttttgtgcgtggtgaatcttcgggtgtgaaatcgaaggtgagtatgtgcgattacttggtgaccttgaattcttcgtttggcacagtgcctgacatgtaccctgttgcgcgtgacataacgtataagaaactgactaacgccatgcgcgaattctattactcgcaaaaaataaccttgtacgaacttcacgggaagttgagttcctattgggacgagttgaaggtcgcaggtttcgatagaaagttaacgagaatggatttggacgatgatgtctatgttgttgactttaatcggaaattgttggtggggagaaacggatctcatccgtttcgtaatacgttaaagtcctattgttttatgttttgtaacgatgggttggttccttgcccgcgttctcagaaatatgattatgctttgatttctaatcaaacgtcttttgttgccgcgaattcgttcttacgtgccgtggatggtaaggatttgacttttaccaatgaggaacatagccttatcgtttatgaagctcctcccggtggtggtaagactcattctttggtgaattcgtacgcggattattgcgttaaagtatcttgtttagtagtgaccgctaacaagaattctcaaaccgagatatctcagcgcatatctaatgaattgatgggcaggaagctagctgctaagtatgttaccgatgcagcttccagagtgttcactgtagattcttacttaatgaatcacttgcgacttacgactcaactgctgtttatcgacgagtgcttcatggttcatgctggggcaattggagccgtggttgagttcacgtcttgtaaagcggtggttttctttggtgatagtaagcaaatccattacattcaccgaaacgatctcggggtttcctttgttgcagatattgatgcgtttattcaaccggaacatcgtatttacggcgaagtgtcctataggtgtccttgggacatttgcgagtggctttccgagttttacccgcgacacgtagctactgctaatgtagggagtattgggaagtcgagtgtgtcaatagaggaaatcaatgggtgcgatgacgtaccttacgacaaggcggcgaagtacattgtgtacactcaggctgaaaagaacgatttgcaaaaacacctcggtcgcttaaccgtgggtcggaacaaggtagtaccaattgtaaataccgttcatgaggtacaaggagagacctataaaagggtacgtctggtgaggtttaagtatcaggaggataccccgttctcttcaaagaatcatattgtggttgctttgactagacatgttgattctttggtttattccgtacttactagtaggaggtacgacgatactgcgactaacatagatagggcgaaggaaatttttgacaaatttcgttcgtcgaatcactcgtacggttcgtcatcgttagagtggtaccttgaaaagtatcctaccgaatataagggtagtaaagcatcctctgctccgataagttgcattaacgaatttcttaatgaggtcgtcgttggttcttctgtcgtgcagttgggtgatgtgtctgaagaactaagttcacgtccctttgaatcgggttgtgataatgttactgtagagacaccgcccctcctgactcgggtaacttacacgaaccggctcgcgttcggcgtagtaaggtcacaagcaattcctccaagaaaagcgtcactgcaagaaaaccttctgtcgtacgaaagtcgtaattataactttatcaagacggaacggtttgttggaccaagcgaatttggtagggcgatggctgctgctgttatcgaacgttgtttcaaaatggaagagatggctaagataaggtgtgatattatatcccttactgaagctaacattttaaaatggctcgataagcgcactccctgtcaaataaaggccgtacacggggagttgaaacttcccttttcggtggaggagcaaatttccaacttcaaactgatggttaaacgtgatgctaaggtaaaacttgacgattcaagtctatctaaacatcccgctgctcagaacatcatgtttcataagaagtttatcaatgccatattttccccgtgtttcgacgagttcaaaaatagagtgttgtcctcgcttaatgacaatatcgtgttctttactgagatgacgaacgctgggttagcggaaattatcagaagaatcattggtgacgacgacaacttatttgttggggaagtggatttcagtaagttcgataagtctcaggatttgttcattaaagagtacgaacgtacgttgtattccgagtttgggttcgataccgaacttctcgatgtgtggatggaaggtgagtatcgcgctagagccaccacgctggacggtcagctgagtttttcagttgatggtcagcgtcgttctggaggttcaaacacttggattgggaattccttggttactctaggtatcctttcgttatattacgacgtttcgaagtttgacttactcctcgtttctggagacgattctttaatttattcgagtgaaaagataagcaacttttcttccgaaatttgcttagaaacaggttttgagactaagtttatgtctccgagcgtgccatatttttgctcaaagtttgtggttcagaccggtaacaaaacgtgttttgtgcctgacccttataaattattagtaaagttgggggctccacaaaataagttaaccgatgtcgagttatttgagttgttcacttcttttaaggacatgacgcaggactttggtgatcaagtggttttggagaagctgaagttgctagtcgaagctaagtacggtttcgctagtgggaccactatgccagcattgtgcgctattcattgtgtgcgatcgaactttctgtcctttgagaggttatttcctttcattaggggttggtatgttgttgacgctctaaaactcagacagcttaggaaactcactaatttgatctgtgaacgtgtagtttacgacaatcgggtgagttatttttcgtacttcgataacccgttcactaaacctgacgctaacgacgataacgtggacgacctcggacaagcgggtgaattagcaaccggctga

SEQ ID NO: 2781 - protein, 3582 aa, Citrus tristeza virus
MSKLRGSFWSSAIAVNSDYTISRIWRKLNTIVVLHYFGFVRITKVIRDKSADMPIVPLRKSVFPFSVRAAVTSFVLLGVLLTLRIQGASVAFPLSTHLALFVPALFAGFSRFSLCKPPLTSAAKRSLRQAKRESVSLSSRASSRFSREVPRGTRSRLHRRVVRRADTAPVESPQDKPTRRNSRLGKTSHLPYVGEAALDDILRWIEEVNPHPSMVAIPVPITFGTMPATAWCSHSEAAVLRAALTITRLKLISPLRRNTYGTSIMTYLLPLTVPVRFLPASASIFPSKSKLGVEVPSGRDLHTAFVRSSHASAFFSDAVRASFVPSSAEQFFHFRRQRTHVLAITDPVLCGTVSVLMSDGVNTARLDVVAPAYYAYAESLGARVRFLWESSDVDDAKVRDGQCYVRHVFDVALYFGRRADLSVRRALGMYPTVGALKAYLVREYGRDSLKVPMRGTYTFGSVFHCLSLNLQVDLRSIPNHHLVGGTSAHVLIGQVRVSVPGSIVKPSRSAVRRRNRRMRRDGFLGSSGSSSSAGESTRCSDCSSPRGLPSPSVLKPSLGRIPSIDRRFRFPAGTQLRVSVPRRVDDHVYVSTGSNFDELCHAVLTRMSKGTTLEILLHSIRERKGLLGFAACFRWGSSHVFVKRGNFTARFPISAVRYENQYAAVMMDVGTSWVPKGYVPDVDVVKRRRSRNRRFPLSHRAVDQSVPALQSSPVEVASVSSDKPSSSQKASSPSTSSSSSFNSTRSSDWVNVGFSHRTTNKVREPRYAGHRRIGNFTFPRGTVYNTPVDERAYKRVLRLRDTTACSFLRILLARLSGYRPLSDEFFNKCVTSRFVACIEPVESGLVKVHFRSDVFRASFPFDGQPIHPATALTLEVVVSWDWMVTAFQNPLKDGYCYIRHFAEVSLSMGRIFFRRDVDLGPFPYVFEVQHRLERLYGKAALRYGVRGQYSAPRCFHCCYNDSPRPMASFNGYHKMGGEDNSLIITDTDRLRAVGSAYEKVKRNIPDSLLVRSVEKDLIEFNQTLVDMHRSRPGVVVPFQMSENQQVMLTRAYPEFNINFIHSVHSDHPVAAGSRALENHLVRKHAGTDYSDVGGCPLFHLRAGHSGVHVCRPVYDVKDAHRRVVRHHQLSKVSLDQSDGVKQVGWTVNTNSVCGNILGECYHASEAMVMVQVYDVPLRELCRAMINKKTSVCYMTMVTPGELLDARESFFIKDLDCSVELDPIADRVVYCFNNSAYTHTYSTICECMRTPCLVVDGFLFTIEMVSLRCSVNYYCITKSSVCPRISETKRLRYRRCDSDLIRIKIPRYSSKTRSCLPGCYYLYLDAKFVSRVYEYVVNNCVVVNAKTFEWTWNYIKSCKSRVVISGKIIHRDEPIALEYLDGFSAVMLSAGVKGRQNADVSRRLAAFSGETSIFELVGFAISEKCRDLFLGIQDAVERCVKSYLRNSFNMSFVDLSDPLLTISEYSELDVPIDLPGFGGIVDGNETRLMEDGVKSALLRKAVQAEAQLSLKRGNTSEIVPCDDDDDSNGDDSRVSLDTDWWFVLRGGSSGGLRAGAAPSLFRCLLRKLGGGLCLAKKVLELLVKRVVESFSRLKRKTARLTSFANLLLARLSCGFFDDTVFSAVWEIAINLTRIVDGVVKTKLGCFRNLFRLIPKLYAGCKDVVKDVSNAYRSVVSFSAEVLGKSYSKLCQFCLEIFDIGLIEVSARNLGLETCVSIALAIFDVLITFPLGSVSFPVVCARVFGRLAMEVGSNFLFKKVFGKPETLGEDTFRRTVSMVLRPKAFDKLSVDAKGLVRCSGVIPGVLRIILSSLFSEDDAWVGYSKHEVSSLPIVTFCVKRLSYSLERCKEACVAFIVDSAKKILKSLTSEFNESIQNSDLTSGAKSLYGHVSSILYTSSGVINKAGSAVATVKAVGSDISGRVKRMRPRFSLSRHFDEQTSEYYSASDCSELDESLFSETPGLRGNARCRDLFRIVSRRAVACCEYVTILLKRLASRAGEYSYSYVMDTLVRLYVATDDVVRRCRSFTFDCTDKASNFVTGFLSWRSLRSGAYSATPGLGGGSRGLTSFSHTGGFTRVIGALGNTLSVVFDEEFFRTLLHRLRADVVVLLVEFLKNLPVCLFSIYTFIECRGRIFPLREFLWGFCRFVWDVIEGLSINTYQYLSAVAEKVYRGAFNRRFNEEDERTLRVITEAEGRIEFLRVVLAEMERFRAASNEVSSSRSSDSPSFPPTYGEIEELNDDSSDSALVIGVDNGTGRTIVDGETDSASGSDSDVSIPLDRDFEQIGRLGGNGNVDVVRLGLKFVLKLLRNLFDARSFKVLYGLLLQTLFYGGSVNKFVCRLVFSLGTCLPFELLRFACSARRLLKSLASFVYQTNLFSEVMVEHLFSVSRLLYDSRYFATVFSELERLNFYLDYFLSLPKRYLFPNSRARSCARVPVPVIRTEGVAPVRERSLNDILDSLDSLKVSDLKGKSTFVDDGESDSGSEHSGSSISFGSVNEEVLNAVNGDSVCEKAPLMKHVTALSRLERHPSGRKDIPVSRKTFVRGESSGVKSKVSMCDYLVTLNSSFGTVPDMYPVARDITYKKLTNAMREFYYSQKITLYELHGKLSSYWDELKVAGFDRKLTRMDLDDDVYVVDFNRKLLVGRNGSHPFRNTLKSYCFMFCNDGLVPCPRSQKYDYALISNQTSFVAANSFLRAVDGKDLTFTNEEHSLIVYEAPPGGGKTHSLVNSYADYCVKVSCLVVTANKNSQTEISQRISNELMGRKLAAKYVTDAASRVFTVDSYLMNHLRLTTQLLFIDECFMVHAGAIGAVVEFTSCKAVVFFGDSKQIHYIHRNDLGVSFVADIDAFIQPEHRIYGEVSYRCPWDICEWLSEFYPRHVATANVGSIGKSSVSIEEINGCDDVPYDKAAKYIVYTQAEKNDLQKHLGRLTVGRNKVVPIVNTVHEVQGETYKRVRLVRFKYQEDTPFSSKNHIVVALTRHVDSLVYSVLTSRRYDDTATNIDRAKEIFDKFRSSNHSYGSSSLEWYLEKYPTEYKGSKASSAPISCINEFLNEVVVGSSVVQLGDVSEELSSRPFESGCDNVTVETPPLLTRVTYTNRLAFGVVRSQAIPPRKASLQENLLSYESRNYNFIKTERFVGPSEFGRAMAAAVIERCFKMEEMAKIRCDIISLTEANILKWLDKRTPCQIKAVHGELKLPFSVEEQISNFKLMVKRDAKVKLDDSSLSKHPAAQNIMFHKKFINAIFSPCFDEFKNRVLSSLNDNIVFFTEMTNAGLAEIIRRIIGDDDNLFVGEVDFSKFDKSQDLFIKEYERTLYSEFGFDTELLDVWMEGEYRARATTLDGQLSFSVDGQRRSGGSNTWIGNSLVTLGILSLYYDVSKFDLLLVSGDDSLIYSSEKISNFSSEICLETGFETKFMSPSVPYFCSKFVVQTGNKTCFVPDPYKLLVKLGAPQNKLTDVELFELFTSFKDMTQDFGDQVVLEKLKLLVEAKYGFASGTTMPALCAIHCVRSNFLSFERLFPFIRGWYVVDALKLRQLRKLTNLICERVVYDNRVSYFSYFDNPFTKPDANDDNVDDLGQAGELATG

SEQ ID NO: 2782 - DNA, 1083 bp, Arabidopsis thaliana
  source 1..1083: mol_type = other DNA
atggctactgggcaggttctgtttcagcgattctattgcaagaagtctttggctaaatttgatgtcaagatagttgctgccagctgtgtatggcttgcatcaaaactggaagaaaaccctaaaaaagctagacaggtcatcatcgtattccacaggatggagtgtcgcagggagaacttgccattagaacatctggatatgtatgccaagaagttctctgagttgaaagttgaattaagcagaactgagagacatatactgaaagagatgggttttgtttgtcatgttgaacatcctcacaagttcatatcaaactaccttgccacattagaaacacctccagaattgaggcaagaagcttggaatttggccaatgatagtctgcgtacaaccctctgtgtaaggttcagaagtgaggttgtggcttgtggggtagtgtatgctgctgctcgtaggtttcaagtaccactccctgagaatccgccgtggtggaaagcatttgatgcagataaatctagtattgacgaagtgtgtagagttcttgctcatttatacagtcttccaaaggctcagtatatctctgtttgcaaggatgggaagccatttacattttctagcaggtccgggaattctcaaggtcaatcagcgacaaaggatctgttgccgggagcaggcgaggctgttgatactaaatgtactgcaggatcagctaataacgacttgaaggatggaatggttactacaccacacgaaaaggctacagattccaagaaaagtggtaccgagtcaaactctcagccaattgtaggagactcaagctatgaaagaagtaaagtaggagatagagaaagagagagtgatagagagaaggaacgaggtagagagagggacaggggtaggtctcacagaggcagagattctgacagagacagtgatagggagagagacaaactcaaagatcgaagtcatcatcggtcaagagacagattgaaggattcaggtggacattcagataaatcaaggcatcattcttctcgggaccgtgactaccgcgactcatcgaaagaccgtcgtaggcaccat

SEQ ID NO: 2783 - DNA, 2586 bp, Solanum lycopersicum
  source 1..2586: mol_type = other DNA
atggctgaaattcttcttacatcagtaatcaataaatctgtagaaatagctggaaatttactgattcaagaaggaaagcgtttatattggttgaaagaggatatcgattggctccagagagaaatgagacacattcgatcttatgttgacaacgcaaaggccaaggaagctggaggtgattcaagggtcaaaaacttattgaaagatattcaagaattggcaggtgatgtggaggatctcttagatgacttccttccaaaaattcaacaatccaataagttcaattattgccttaagaggagttcttttgcagatgagtttgctatggagattgagaagataaagagaagggttgttgacattgaccgaataaggaaaacttacaacatcatagatacagataacaataatgatgattgtgttctgctggatcggagaagattattcctacatgctgatgaaacagagatcatcggtttggatgatgacttcaatatgctacaagccaaattacttaatcaagatttgcattatggagttgtttccatagttggcatgcccggtctggggaaaacaactcttgccaagaaactttataggctcattcgtgatcaatttgagtgttctggactggtctacgtttcacaacagccaagagcgagtgaaatcttacttgacattgccaaacaaattggactgacggaacagaaaatgaaggaaaatttggaggacaacctgcgatcactcttgaaaataaaaaggtatgttatcctcctagatgacatttgggatgtggaaatttgggatgatctgaaacttgtccttcctgaatgtgattcaaaagtcggcagtagaatgataatcacgtctcgaaatagtaatgtaggcagatacataggaggggaatcctccctccatgcattgcaacccctagaatccgagaaaagctttgaactctttaccaagaaaatctttaattttgatgataataatagttgggccaatgcttcacctgacttggtgaatattggtagaaatatagttgggagatgtggaggtataccgctagccatagtggtgactgcaggcatgttaagggcaagagaaagaacagaacatgcgtggaacagagtacttgagagtatgggccataaagttcaagatggatgtgctaaggtattggctctcagttacaatgatttacctattgcctcaaggccatgtttcttgtactttggcctttaccccgaggaccatgaaattcgtgcttttgatttgataaatatgtggattgctgagaagtttatagtagtaaatagtggtaataggcgagaggctgaggatttggcggaggacgtcctaaatgatttggtttctagaaacttgattcaacttgccaaaaggacatataatggaagaatttcaagttgtcgcatacatgacttgttacatagtttgtgtgtggacttggctaaggaaagtaacttctttcacaccgcgcatgatgcatttggtgatcccggcaatgttgctaggctccgaaggattacattctactctgacaatgtcatgattgagttcttccgttcaaatcctaagcttgagaagcttcgtgtacttttctgtttcgcaaaagacccttccatattttctcatatggcttattttgacttcaaattgttgcacacattggttgtagtcatgtctcaaagttttcaagcatatgtcactatcccaagcaaatttgggaacatgacttgcttacgctatctgagattggaggggaatatttgtggaaaactgccaaatagtattgtcaagctcacacgtctagagaccatagacattgatcgacgtagcctcattcaacctccttctggtgtttgggagtctaaacatttgagacatctttgttatagagattatggacaagcatgtaacagttgcttttctataagctcattttacccaaatatttactcattgcatcctaacaatctacaaaccttgatgtggatacctgataaattttttgaaccgaggttgttgcaccgattgatcaatttaagaaaactgggtatactgggagtgtccaattctaccgttaagatgttatcaatatttagccctgtgcttaaggcgctggaggttctgaagctcagtttttccagtgacccgagtgaacaaataaagttgtcatcgtatccacatattgctaagttgcatttgaatgttaacagaacaatggccttgaactctcaatcatttcctccaaatctcatcaagcttactctagcctactttagtgtagaccgttatatactggcagtacttaagacatttcccaaattaagaaaacttaaaatgttcatctgcaagtataatgaagaaaagatggatctctcgggcgaggcaaatggttatagctttccgcaacttgaagttttgcatattcatagcccgaatgggttgtctgaagtaacgtgcacggatgatgtcagtatgcccaaattgaaaaagctgttacttacaggattccattgccgaatcagtttatcggaacggcttaaaaagctgagtaaatga

SEQ ID NO: 2784 - DNA, 3156 bp, Solanum tuberosum
  source 1..3156: mol_type = other DNA
atggcttatgctgctgttacttcccttatgagaaccatacatcaatcaatggaacttactggatgtgatttgcaaccgttttatgaaaagctcaaatctttgagagctattctggagaaatcctgcaatataatgggcgatcatgaggggttaacaatcttggaagttgaaatcgtagaggtagcatacacaacagaagatatggttgactcggaatcaagaaatgtttttttagcacagaatttggaggaaagaagcagggctatgtgggagatttttttcgtcctggaacaagcactagaatgcattgattccaccgtgaaacagtggatggcaacatcggacagcatgaaagatctaaaaccacaaactagctcgcttgtcagtttacctgaacatgatgttgagcagcccgagaatataatggttggccgtgaaaatgaatttgagatgatgctggatcaacttgctagaggaggaagggaactagaagttgtctcaatcgtagggatgggaggcatcgggaaaacaactttggctacaaaactctatagtgatccgtgcattatgtctcgatttgatattcgtgcaaaagcaactgtttcacaagagtattgtgtgagaaatgtactcctaggccttctttctttgacaagtgatgaacctgatgatcagctagcggaccgactgcaaaagcatctgaaaggcaggagatacttggtagtcattgatgacatatggactacagaagcttgggatgatataaaactatgtttcccagactgttataatggaagcagaatactcctgactactcggaatgtggaagtggctgaatatgctagttcaggtaagcctcctcatcacatgcgcctcatgaattttgacgaaagttggaatttactacacaaaaagatctttgaaaaagaaggttcttattctcctgaatttgaaaatattgggaaacaaattgcattaaaatgtggaggattacctctagcaattactgtgattgctggacttctctccaaaatgggtcaaagattagatgagtggcaaagaattggggaaaatgtaagttcggtcgttagcacagatcctgaagcacaatgcatgagagtgttggctttgagttaccatcacttgccttctcacctaaaaccgtgttttctgtattttgcaattttcacagaggatgaacagatttctgtaaatgaacttgttgagttatggcctgtagagggatttttgaatgaagaagagggaaaaagcatagaagaggtggcaacaacatgtataaacgaacttatagatagaagcttaattttcatccacaattttagttttcgtggaacaatagaaagttgtggaatgcatgatgtgacccgtgaactctgtttgagggaagctcgaaacatgaattttgtgaatgttatcagaggaaagagtgatcaaaattcatgtgcacaatccatgcagcgttcctttaagagtcgaagtcggatcagaatccataaggtggaagaattggcttggtgtcgtaacagtgaggctcattctattatcatgttgggtggattcgaatgcgtcacactggaattgtctttcaagctagtaagagtactagatcttggtttgaatacatggccaatttttcccagtggagtactttctctaattcatttgagatacctatctttgcgttttaatccttgcttacagcagtatcaaggatcgaaagaagctgttccctcatcaataatagacattcctctatcgatatcaagcctatgctatctgcaaacttttaaacttaaccttccatttcccagttattatcctttcatattaccatcggaaattttgacgatgccacaattgaggacgctgtgtatgggctggaattacttgcggagtcatgagcctacagagaacagattggttttgaaaaatttgcaatgcctcaatcaattgaaccctcggtattgtacagggtctttttttagactatttcccaatttaaagaagttgcaagtatttggcgtcccagaagactttcgcaatagccaggacctgtatgattttcgctacttatatcagctcgaagaattgacatttcgtttatattatccatatgctgcttgctttctaaaaaacactgcaccttcaggttctacgcaagatcctctgaggtttcagacggaaatattgcacaaagagattgatttcgggggaactgcacctccaactttactcttacctcctccggatgcttttccacaaaaccttaagagtttaacttttaggggagaattctctgtggcatggaaggatttgagcattgttggtaaattacccaaactcgaggtccttatactatcatggaatgccttcataggcaaggagtgggaagtagttgaggaagggtttcctcacttgaagttcttgtttctggatgatgtatacattcgatactggagagctagtagtgatcactttccgtaccttgaacgagttattcttagagattgccgtaatttggattcaatccctcgagattttgcagatataaccacactagctcttattgatatagattactgtcaacaatctgttgtgaattccgccaagcaaattcaacaggacattcaagacaactatggaagctctatcgaggtccatactcgtcatcttttgtaagacatcttcttccttgctttacaacaataattaactcatcatcatagtaaactcgataataatctggataatagccttagtaagtcaaattgcaccaattcaacaaaagttcttgatgctgtcattgtgtttgatttgaatccttccaatattgtgtaacttgttatacttgcatgttcattcttgattttgggaagtgtaacatttcatttttcatcttttgtggctagcattcccaagagtgtgacaacagttgaagatgatgatgatagtgtgacaacagatgaagatgatgatgatgatgactttgagaaagaagttgcttcttgccgcaataatgtgtaagttcttatacctgcatgctcattcttgctataatgttctcttgttccttaattatgggacatctgacatattattttccatgttttgcgtcttttatttttctgcagcgag

SEQ ID NO: 2785 - DNA, 480 bp, Tobacco mosaic virus
  source 1..480: mol_type = other DNA
atgtcttacagtatcactactccatctcagttcgtgttcttgtcatcagcgtgggccgacccaatagagttaattaatttatgtactaatgccttaggaaatcagtttcaaacacaacaagctcgaactgtcgttcaaagacaattcagtgaggtgtggaaaccttcaccacaagtaactgttaggttccctgacagtgactttaaggtgtacaggtacaatgcggtattagacccgctagtcacagcactgttaggtgcattcgacactagaaatagaataatagaagttgaaaatcaggcgaaccccacgactgccgaaacgttagatgctactcgtagagtagacgacgcaacggtggccataaggagcgcgataaataatttaatagtagaattgatcagaggaaccggatcttataatcggagctctttcgagagctcttctggtttggtttggacctctggtcctgcaacttga

SEQ ID NO: 2786 - DNA, 795 bp, Soybean mosaic virus
  source 1..795: mol_type = other DNA
tcaggcaaggagaaggaaggagacatggatgcaggtaaggatccaaagaagaataccagcagtagcaaaggagctggtacaagcagcaaagatgtaaatgttggatcaaaaggaaaggtggttccgcgtttgcagaagattacaaggaagatgaatcttccaatggttgaagggaagatcattcttagcttggaccacttgcttgagtacaaacctaatcaggttgatttattcaatactcgagcaacaagaacacagtttgaagcgtggtacaatgcagttaaagatgaatatgagcttgatgatgagcagatgggtgtggtcatgaatggtttcatggtttggtgtattgacaatggcacttctccagatgccaatggcgtgtgggtgatgatggatggagaggaacagattgaatatccgctgaagccaattgtcgaaaatgcaaaaccaactttgagacaaatcatgcatcatttttcagatgcagcagaagcttacattgagatgagaaattctgaaagtccgtatatgcctagatatggactgttaaggaatttgagagatagagagctagcccgctatgcttttgacttctatgaggtcacttctaaaacaccaaacagggcaagggaagcaatagcgcaaatgaaggctgcagctctctcgggagttaacaacaagttgtttggacttgatggaaatatctcaaccaactccgaaaatactgaaaggcacactgcaagggatgtgaatcaaaacatgcacactcttctgggcatgggcccaccgcag

SEQ ID NO: 2787 - DNA, 654 bp, Cucumber mosaic virus
  source 1..654: mol_type = other DNA
atggacaaatctgaatcaaccagtgccggtcgtaatcgtcgacgtcgtctgcgtcgcggttcccgctccgcctcctcctccgcggatgctacatttagagtcctgtcgcaacagctttcgcgacttaataagacgttagcagctggtcgtcctactattaaccacccaacctttgtgggtagtgagcgttgtaaacctggatacacgttcacctcgattaccctgaagccaccgaaaatagacaaggggtcttattatggcaaaaggttgttacttcctgattcagtcactgagttcgataagaagcttgtttcgcgcattcaaattcgagttaatcctttgccgaaatttgattctaccgtgtgggtgacggtccgtaaagttcctgcctcctcggacctgtctgtatccgccatctctgctatgtttgcggacggagcctcaccggtactggtttatcagtatgctgcatctggcgttcaagccaataacaaattgttatatgatctttcagtgatgcgcgctgatattggtgacatgagaaagtacgccgtgctcgtgtattcaaaagacgatgcgcttgagacggacgaactagtacttcatatcgacatcgagcaccaacgcattcccacgtctggggtgctcccagtt

SEQ ID NO: 2788 - DNA, 708 bp, Potato virus X
  source 1..708: mol_type = other DNA
atgactacaccagccaacaccactcaagctgtaggatccaccaaatcaactaccaccaccactgcaggcgcaactcctgccaattcagggctattcaccataccagatggggacttcttcagcaccgcaaaggctgtggtcgctagcaatgccgtggccaccaacgaggatctcgccaaaatacaggaaatctggaaggacaagaaaattccttcagacactatggctcaggcagcttgggacttagtgagacactgtgccgacgtcgggtcctctgcccaaactgaaatgataggcaccggtccatactccaatggggtcagccgggctagactggcagctgcaattaaagaggtgtgcacactgaggcagttctgcaaaaagtatgcccccgtggtctggaactggatgctcacaaacaacagcccaccggccaactggcaggcacaaggcttcaagccggagcacaaattcgcagcctttgacttctttgatggagtcactaatcccgcagctatcactcccaaagaggggctcatgagacctccgtctgaagcagaaatgaatgccgcccaaactgctgcctttgtgaagatcaccaaggcgagggcgcaatccaacgactttgccagtctggatgccgcggtcactaggggccgcatcacaggaacgactgttgcagaagcagttgtttcactacccccacca

SEQ ID NO: 2789 - DNA, 774 bp, Tomato spotted wilt virus
  source 1..774: mol_type = other DNA
atgtctaaggttaagctcactaaggaaagcattgttgctttgttgacacaaggcaaagaccttgagtttgaggaagatcagaatctggtagcattcaacttcaagactttttgtctggaaaacatcgaccagatcaagaagatgagcgttatttcatgtctgacattcctaaagaatcgtcagagcataatgaaggttattaagcaaagcgattttacttttggtaaaattaccataaagaaaacttcagacaggattggaggcactgacatgaccttcagaaggcttgatagcttgatcagggtcaggcttgttgaagaaactgggaattctgagaatctcaatactatcaaatctaagattgcttcccatcctttgattcaagcctatggattacctctcgatgatgcaaagtctgtgagacttgccataatgctgggaggtagcttacctcttattgcttcagttgatagctttgagatgatcagtgttgtcttggctatatatcaggatgcaaaatacaaggacctcgggatcgacccaaagaagtatgacaccaaggaagccttaggaaaagtttgcactgtgctgaaaagcaaagcatttgaaatgaatgaagatcaggtgaagaaggggaaagagtatgctgctatacttagctccagcaatcctaatgctaaagggagtgttgctatggaacattacagtgaaactcttaacaagttctatgaaatgttcggggttaaaaagcaggcaaaactcgcagaacttgct

SEQ ID NO: 2790 - DNA, 777 bp, Glycine max
  source 1..777: mol_type = other DNA
atgagtggtagcaacgatggtagcggcagctggagctctaggtttttgaaggtggctagtgcagctgccgctacagccgccgttgccggcggtttatatgccattctttcatcctcaacctctgctagctctgagatggaagtgccgtttggcagcgcacggcctgagagcaacactaagcgacaacaagagtcattctatgagcacgaagaaactgaggatgacgaagaatctgaggaggcagacaatgggaaatggaagaaacctgagagtggttgggtgaagctgaatgtggatggttcacgtattcatgaagaacccgcctctgcgggttgtggtggggttataagggacgaatggggaacatggtgcgtgggctttgatcagaaattggaccccaacatttgtcgacaagcccattatacagagttacaagctattctaacgggcctgaaggtggctcgggaggacatgatcaatgtggaaaaactggttgtggagtcagacagtgagcccgcggtgaacatggtgaagagtgggcttgggtacaagtatcatcgtccagagtataaggttgttcaagacataaataggcttcttaaagatcctaagtggctagcgaggttggattatgttcctaggaaagctaatcgagtcgctaattacctcgccaagcgtgtttgtaaaccgtcttctcctcatgatcatcatcatttcagcaagtatccttgtcccccggattacgattgtgaaaagattttcttggaggataacaat

SEQ ID NO: 2791 - protein, 361 aa, Arabidopsis thaliana
MATGQVLFQRFYCKKSLAKFDVKIVAASCVWLASKLEENPKKARQVIIVFHRMECRRENLPLEHLDMYAKKFSELKVELSRTERHILKEMGFVCHVEHPHKFISNYLATLETPPELRQEAWNLANDSLRTTLCVRFRSEVVACGVVYAAARRFQVPLPENPPWWKAFDADKSSIDEVCRVLAHLYSLPKAQYISVCKDGKPFTFSSRSGNSQGQSATKDLLPGAGEAVDTKCTAGSANNDLKDGMVTTPHEKATDSKKSGTESNSQPIVGDSSYERSKVGDRERESDREKERGRERDRGRSHRGRDSDRDSDRERDKLKDRSHHRSRDRLKDSGGHSDKSRHHSSRDRDYRDSSKDRRRHH

SEQ ID NO: 2792 - protein, 1246 aa, Solanum peruvianum
MAENEIEEMLEHLRRIKSGGDLDWLDILRIEELEMVLRVFRTFTKYNDVLLPDSLVELTKRAKLIGEILHRLFGRIPHKCKTNLNLERLESHLLEFFQGNTASLSHNYELNNFDLSKYMDCLENFLNDVLMMFLQKDRFFHSREQLAKHRSIKELKIVQKKIRFLKYIYAPEINGYVDYEKQECLENRIQFMTNTVGQYCLAVLDYVTEGKLNEENDNFSKPPYLLSLIVLVELEMKKIFHGEVKASKFTQSKTFKDKKLPKGFSHHLHNLLMYLRNKKLENFPNNIAAQNIDVAIEFLLVFLDADVSNHVINGNWLKEVLLKVGAIAGDILYVIQKLLPRSINKDETSNISLCSIQILEKTKDLKAQVETYYKSLKFTPSQFPTFGGLSFLNSLLRKLNEMSTSKSGLGFLMKPLLGNLEKELSSLTSILEKELSSIFRDVVHHEHNIPKDLQRRTINLSYEAEVAIDSILAQYNAFLHIFCSLPTIVKEIKQINAEVTEMWSADIPLNPHYVAAPLKHLPDRHSNLVTDEEVVGFENKAEELIDYLIRGTNELDVVPIVGMGGQGKTTIARKLYNNDIIVSRFDVRAWCIISQTYNRRELLQDIFSQVTGSDDNGATVDVLADMLRRKLMGKRYLIVLDDMWDCMVWDDLRLSFPDDGIRSRIVVTTRLEEVGKQVKYHTDPYSLPFLTTEESCQLLQKKVFQKEDCPPELQDVSQAVAEKCKGLPLVVVLVAGIIKKRKMEESWWNEVKDALFDYLDSEFEEYSLATMQLSFDNLPHCLKPCLLYMGMFSEDARIPASTLISLWIAEGFVENTESGRLMEEEAEGYLMDLISSNLVMLSKRTYKGRVKYCQVHDVVHHFCLEKSREAKFMLAVKGQYIHFQPSDWKGTRVSFSFSEELSKFASLVSKTQKPFHQHLRSLITTNRAKSINDIFSCQISELRLLKVLDLSSYIVEFLSLATFKPLNQLKYLAVQAFEFYFDPGSHLPHIETFIVMNLPYYDILLPVSFWEMKKLRHAHFGKAEFDKQGLSEGSSKLENLRILKNIVGFDRVDVLSRRCPNLQQLQITYFGNNEEPFCPKLENLTQLQQLQLSFARPRTLSGLQLPSNLNKLVLEGIHIGCVIPFIAGLPSLEYLQLHDVCFPQSEEWCLGDITFHKLKLLKLVKLNISRWDVSEESFPLLETLVIKKCIDLEEIPLSFADIPTLEQIKLIGSWKVSLEDSAVRMKEEIKDTEGCDRLHLVKQRSD

SEQ ID NO: 2793 - protein, 861 aa, Solanum lycopersicum
MAEILLTSVINKSVEIAGNLLIQEGKRLYWLKEDIDWLQREMRHIRSYVDNAKAKEAGGDSRVKNLLKDIQELAGDVEDLLDDFLPKIQQSNKFNYCLKRSSFADEFAMEIEKIKRRVVDIDRIRKTYNIIDTDNNNDDCVLLDRRRLFLHADETEIIGLDDDFNMLQAKLLNQDLHYGVVSIVGMPGLGKTTLAKKLYRLIRDQFECSGLVYVSQQPRASEILLDIAKQIGLTEQKMKENLEDNLRSLLKIKRYVILLDDIWDVEIWDDLKLVLPECDSKVGSRMIITSRNSNVGRYIGGESSLHALQPLESEKSFELFTKKIFNFDDNNSWANASPDLVNIGRNIVGRCGGIPLAIVVTAGMLRARERTEHAWNRVLESMGHKVQDGCAKVLALSYNDLPIASRPCFLYFGLYPEDHEIRAFDLINMWIAEKFIVVNSGNRREAEDLAEDVLNDLVSRNLIQLAKRTYNGRISSCRIHDLLHSLCVDLAKESNFFHTAHDAFGDPGNVARLRRITFYSDNVMIEFFRSNPKLEKLRVLFCFAKDPSIFSHMAYFDFKLLHTLVVVMSQSFQAYVTIPSKFGNMTCLRYLRLEGNICGKLPNSIVKLTRLETIDIDRRSLIQPPSGVWESKHLRHLCYRDYGQACNSCFSISSFYPNIYSLHPNNLQTLMWIPDKFFEPRLLHRLINLRKLGILGVSNSTVKMLSIFSPVLKALEVLKLSFSSDPSEQIKLSSYPHIAKLHLNVNRTMALNSQSFPPNLIKLTLAYFSVDRYILAVLKTFPKLRKLKMFICKYNEEKMDLSGEANGYSFPQLEVLHIHSPNGLSEVTCTDDVSMPKLKKLLLTGFHCRISLSERLKKLSK

SEQ ID NO: 2794 - protein, 937 aa, Solanum tuberosum
MAYAAVTSLMRTIHQSMELTGCDLQPFYEKLKSLRAILEKSCNIMGDHEGLTILEVEIVEVAYTTEDMVDSESRNVFLAQNLEERSRAMWEIFFVLEQALECIDSTVKQWMATSDSMKDLKPQTSSLVSLPEHDVEQPENIMVGRENEFEMMLDQLARGGRELEVVSIVGMGGIGKTTLATKLYSDPCIMSRFDIRAKATVSQEYCVRNVLLGLLSLTSDEPDDQLADRLQKHLKGRRYLVVIDDIWTTEAWDDIKLCFPDCYNGSRILLTTRNVEVAEYASSGKPPHHMRLMNFDESWNLLHKKIFEKEGSYSPEFENIGKQIALKCGGLPLAITVIAGLLSKMGQRLDEWQRIGENVSSVVSTDPEAQCMRVLALSYHHLPSHLKPCFLYFAIFTEDEQISVNELVELWPVEGFLNEEEGKSIEEVATTCINELIDRSLIFIHNFSFRGTIESCGMHDVTRELCLREARNMNFVNVIRGKSDQNSCAQSMQRSFKSRSRIRIHKVEELAWCRNSEAHSIIMLGGFECVTLELSFKLVRVLDLGLNTWPIFPSGVLSLIHLRYLSLRFNPCLQQYQGSKEAVPSSIIDIPLSISSLCYLQTFKLNLPFPSYYPFILPSEILTMPQLRTLCMGWNYLRSHEPTENRLVLKNLQCLNQLNPRYCTGSFFRLFPNLKKLQVFGVPEDFRNSQDLYDFRYLYQLEELTFRLYYPYAACFLKNTAPSGSTQDPLRFQTEILHKEIDFGGTAPPTLLLPPPDAFPQNLKSLTFRGEFSVAWKDLSIVGKLPKLEVLILSWNAFIGKEWEVVEEGFPHLKFLFLDDVYIRYWRASSDHFPYLERVILRDCRNLDSIPRDFADITTLALIDIDYCQQSVVNSAKQIQQDIQDNYGSSIEVHTRHLFIPKSVTTVEDDDDSVTTDEDDDDDDFEKEVASCRNNVE

SEQ ID NO: 2795 - protein, 159 aa, Tobacco mosaic virus; identical to SEQ ID NO: 26

SEQ ID NO: 2796 - protein, 265 aa, Soybean mosaic virus
SGKEKEGDMDAGKDPKKNTSSSKGAGTSSKDVNVGSKGKVVPRLQKITRKMNLPMVEGKIILSLDHLLEYKPNQVDLFNTRATRTQFEAWYNAVKDEYELDDEQMGVVMNGFMVWCIDNGTSPDANGVWVMMDGEEQIEYPLKPIVENAKPTLRQIMHHFSDAAEAYIEMRNSESPYMPRYGLLRNLRDRELARYAFDFYEVTSKTPNRAREAIAQMKAAALSGVNNKLFGLDGNISTNSENTERHTARDVNQNMHTLLGMGPPQ

SEQ ID NO: 2797 - protein, 218 aa, Cucumber mosaic virus
MDKSESTSAGRNRRRRLRRGSRSASSSADATFRVLSQQLSRLNKTLAAGRPTINHPTFVGSERCKPGYTFTSITLKPPKIDKGSYYGKRLLLPDSVTEFDKKLVSRIQIRVNPLPKFDSTVWVTVRKVPASSDLSVSAISAMFADGASPVLVYQYAASGVQANNKLLYDLSVMRADIGDMRKYAVLVYSKDDALETDELVLHIDIEHQRIPTSGVLPV

SEQ ID NO: 2798 - protein, 236 aa, Potato virus X
MTTPANTTQAVGSTKSTTTTTAGATPANSGLFTIPDGDFFSTAKAVVASNAVATNEDLAKIQEIWKDKKIPSDTMAQAAWDLVRHCADVGSSAQTEMIGTGPYSNGVSRARLAAAIKEVCTLRQFCKKYAPVVWNWMLTNNSPPANWQAQGFKPEHKFAAFDFFDGVTNPAAITPKEGLMRPPSEAEMNAAQTAAFVKITKARAQSNDFASLDAAVTRGRITGTTVAEAVVSLPPP

SEQ ID NO: 2799 - protein, 258 aa, Tomato spotted wilt virus
MSKVKLTKESIVALLTQGKDLEFEEDQNLVAFNFKTFCLENIDQIKKMSVISCLTFLKNRQSIMKVIKQSDFTFGKITIKKTSDRIGGTDMTFRRLDSLIRVRLVEETGNSENLNTIKSKIASHPLIQAYGLPLDDAKSVRLAIMLGGSLPLIASVDSFEMISVVLAIYQDAKYKDLGIDPKKYDTKEALGKVCTVLKSKAFEMNEDQVKKGKEYAAILSSSNPNAKGSVAMEHYSETLNKFYEMFGVKKQAKLAELA

SEQ ID NO: 2800 - protein, 259 aa, Glycine max
MSGSNDGSGSWSSRFLKVASAAAATAAVAGGLYAILSSSTSASSEMEVPFGSARPESNTKRQQESFYEHEETEDDEESEEADNGKWKKPESGWVKLNVDGSRIHEEPASAGCGGVIRDEWGTWCVGFDQKLDPNICRQAHYTELQAILTGLKVAREDMINVEKLVVESDSEPAVNMVKSGLGYKYHRPEYKVVQDINRLLKDPKWLARLDYVPRKANRVANYLAKRVCKPSSPHDHHHFSKYPCPPDYDCEKIFLEDNN

SEQ ID NO: 2801 - DNA, 3774 bp, Solanum lycopersicum
  source 1..3774: mol_type = other DNA
atggaaaaacgaaaagatattgaagaagcaaacaactcattggtgttattttctgctcttagcaaggacattgccaatgttctaattttcctagagaatgaggaaaatcaaaaagctcttgacaaagatcaagttgaaaagctaaaattgaaaatggcatttatttgtacatatgttcagctttcttattccgattttgagcagtttgaagatataatgactagaaatagacaagaggttgagaatctgcttcaatcacttttggatgatgatgtccttactagcctcaccagtaatatggatgactgtatcagcttgtatcatcgttcttataaatcagatgccatcatgatggatgagcaattggacttcctcctcttgaatctgtatcatctatccaagcatcacgctgaaaagatatttcctggagtgactcaatatgaagttcttcagaatgtatgtggcaacataagagatttccatgggttgatactgaatggttgcattaagcatgagatggttgagaatgtcttacctctgtttcaactcatggctgaaagagtaggacacttcctttgggaggatcagactgatgaagactctcggctctccgagctagatgaggatgaacacaatgatagagactctcgactcttccagctaacacatctactcttgaagattgttccaactgaactggaggttatgcacatatgttatacaaatttgaaagcttcaacttcagcagaagttggacgcttcattaagaagctcctggaaacctcaccggatattctcagagaatatatcattcaactacaagagcatatgttaactgttattccccctagcactttaggggctcgaaacattcatgtcatgatggaattcctattacttattctttctgatatgcccaaggactttattcatcatgacaaactttttgatctcttggctcatgttggaacacttaccagggaggtatcgactcttgtacgtgacttggaagagaaattaaggaataaagagggtaataaccaaacaaattgtgcaaccctagacttgctggaaaatattgaactcctcaagaaagatctcaaacatgtttatctgaaagccccaaattcatctcaatgttgcttccccatgagtgatggaccactcttcatgcatcttctacacatgcacttaaatgatttgctagattctaatgcttattcaatttctttgataaaggaagaaatcgagttggtgagtcaagaactggaattcataagatcattctttggggatgctgctgagcaaggattgtataaagatatctgggcacgtgttctagatgtggcttatgaggcaaaagatgtcatagattcaattattgttcgagataatggtctcttacatcttattttctcacttcccattaccataaagaagatcaaacttatcaaagaagagatctctgctttagatgagaacattcccaaggacagaggtctaatcgttgtgaactctcccaagaaaccagttgagagaaagtcattgacaactgataaaataattgtaggttttgaggaggagacaaacttgatacttagaaagctcaccagtggacccgcagatttagatgtcatttcgatcaccggtatgccgggttcaggtaaaactactttggcatacaaagtatacaatgataagtcagtttctagacattttgaccttcgtgcatggtgcacggtcgatcaaggatatgacgacaagaagttgttggatacaattttcagtcaagttagtggctcagattcaaatttgagtgagaatattgatgttgctgataaattgcggaaacaactgtttggaaagaggtatcttattgtcttagatgatgtgtgggatactactacattggatgagttgacaagaccttttcctgaagctaagaaaggaagtaggattattttgacaactcgagaaaaggaagtggctttgcatggaaagctgaacactgatcctcttgaccttcgattgctaagaccagatgaaagttgggaacttttagataaaaggacatttggtaatgagagttgccctgatgaactattagatgtcggtaaagaaatagccgaaaattgtaaagggcttcctttggtggctgatctgattgctggagtcattgctgggagggaaaagaaaaggagtgtgtggcttgaagttcaaagtagtttgagttcttttattttgaacagtgaagtggaagtgatgaaagttatagaattaagttatgaccatttaccacatcacctcaagccatgcttgcttcactttgcaagttggccgaaggacactcctttgacaatctatttgtttactgtttatttgggtgctgaaggatttgtggaaaagacggagatgaagggtatagaagaagtggtgaagatttatatggatgatttaatttccagtagcttggtaatttgtttcaatgagataggtgatatactgaatttccaaattcatgatcttgtgcatgacttttgtttgataaaagcaagaaaggaaaatttgtttgatcggataagatcaagtgctccatcagatttgttgcctcgtcaaattaccattgattatgatgaggaggaggagcactttgggcttaattttgtcatgttcgattcaaataagaaaaggcattctggtaaacacctctattctttgaggataaatggagaccagctggatgacagtgtttctgatgcatttcacctaagacacttgaggcttattagagtgttggacctggaaccctctttaatcatggtgaatgattctttgctgaatgaaatatgcatgttgaatcatttgaggtacttaagaattcggacacaagttaaatatctgcctttctctttctcaaacctctggaatctagaaagtctgtttgtgtctaacaaaggatcaatcttggtactattaccgagaattttggatcttgtaaagttgcgagtgctgtccgtgggtgcttgttctttctttgatatggatgcagatgaatcaatattgatagcaaaggacacaaagttagagaacttgagaatattaggggaactgttgatttcctattcgaaagatacaatgaatattttcaaaaggtttcccaatcttcaggtgcttcagtttgaactcaaggagtcatgggattattcaacagagcaacattggttcccgaaattggattgcctaactgaactagaaacactctgtgtaggttttaaaagttcaaacacaaaccactgtgggtcctctgttgtgacaaatcggccgtgggattttcacttcccttcaaatttgaaagaactgttgttgtatgactttcctctgacatccgattcactatcaacaatagcgagactgcccaaccttgaaaatttgtccctttatgatacaatcatccagggagaagaatggaacatgggggaggaagacacttttgagaatctcaaatttttgaacttgcgtctactgactctttccaagtgggaggttggagaggaatccttccccaatcttgagaaattaaaactgcaggaatgtggtaagcttgaggagattccacctagttttggagatatttattcattgaaatttatcaaaattgtaaagagtcctcaacttgaagattctgctctcaagattaagaaatacgctgaagatatgagaggagggaacgatcttcagatccttggccagaagaatatccccttatttaagtag

SEQ ID NO: 2802 - DNA, 2739 bp, Glycine max
  source 1..2739: mol_type = other DNA
atggcttatgctgctgttacttcccttatgagaaccatacatcaatcaatggaacttactggatgtgatttgcaaccgttttatgaaaagctcaaatctttgagagctattctggagaaatcctgcaatataatgggcgatcatgaggggttaacaatcttggaagttgaaatcatagaggtagcatacacaacagaagatatggttgactcggaatcaagaaatgtttttttagcacggaatgtggggaaaagaagcagggctatgtgggggatttttttcgtcttggaacaagcactagaatgcattgattccaccgtgaaacagtggatggcaacatcggacagcatgaaagatctaaaaccacaaactagctcacttgtcagtttacctgaacatgatgttgagcagcccgagaatataatggttggccgtgaaaatgaatttgagatgatgctggatcaacttgctagaggaggaagggaactagaagttgtctcaatcgtagggatgggaggcatcgggaaaacaactttggctgcaaaactctatagtgatccttacattatgtctcgatttgatattcgtgcaaaagcaactgtttcacaagagtattgtgtgagaaatgtactcctaggccttctttctttgacaagtgatgaacctgattatcagctagcggaccaactgcaaaagcatctgaaaggcaggagatacttggtagtcattgatgacatatggactacagaagcttgggatgatataaaactatgtttcccagactgcgataatggaagcagaatactcctgactactcggaatgtggaagtggctgaatatgctagctcaggtaagcctcctcatcacatgcgcctcatgaattttgacgaaagttggaatttactacacaaaaagatctttgaaaaagaaggttcttattctcctgaatttgaaaatattgggaaacaaattgcattaaaatgtggagggttacctctagcaattactttgattgctggacttctctccaaaatcagtaaaacattggatgagtggcaaaatgttgcggagaatgtacgttcggtggtaagcacagatcttgaagcaaaatgcatgagagtgttggctttgagttaccatcacttgccttctcacctaaaaccgtgttttctgtattttgcaattttcgcagaggatgaacggatttatgtaaataaacttgttgagttatgggccgtagaggggtttttgaatgaagaagagggaaaaagcatagaagaggtggcagaaacatgtataaacgaacttgtagatagaagtctaatttctatccacaatgtgagttttgatggggaaacacagagatgtggaatgcatgatgtgacccgtgaactctgtttgagggaagctcgaaacatgaattttgtgaatgttatcagaggaaagagtgatcaaaattcatgtgcacaatccatgcagtgttcctttaagagtcgaagtcggatcagtatccataatgaggaagaattggtttggtgtcgtaacagcgaggctcattctatcatcacgttgtgtatattcaaatgcgtcacactggaattgtctttcaagctagtaagagtactagatcttggtttgactacatgcccaatttttcccagtggagtactttctctaattcatttgagatacctatctttgcgttttaatcctcgcttacagcagtatcgaggatcgaaagaagctgttccctcatcaataatagacattcctctatcgatatcaagcctatgctatctgcaaacttttaaactttaccatccatttcccaattgttatcctttcatattaccatcggaaattttgacaatgccacaattgaggaagctgtgtatgggctggaattacttgcggagtcatgagcctacagagaacagattggttttgaaaagtttgcaatgcctcaatgaattgaatcctcggtattgtacagggtcttttttaagactatttcccaatttaaagaagttggaagtatttggcgtcaaagaggactttcgcaatcacaaggacctgtatgattttcgctacttatatcagctcgagaaattggcatttagtacttattattcatcttctgcttgctttctaaaaaacactgcacctttaggttctactccgcaagatcctctgaggtttcagatggaaacattgcacttagagactcattccagggcaactgcacctccaactgatgttccaactttcctcttacctcctccggattgttttccacaaaaccttaagagtttaacttttagcggagatttctttttggcatggaaggatttgagcattgttggtaaattacccaaactcgaggtccttcaactatcacacaatgccttcaaaggcgaggagtgggaagtagttgaggaagggtttcctcacttgaagttcttgtttctggatagcatatacattcggtactggagagctagtagtgatcactttccataccttgaacgactttttcttagcgattgcttttatttggattcaatccctcgagattttgcagatataaccacactagctcttattgatatatttcgctgccaacaatctgttgggaattccgccaagcaaattcaacaggacattcaagacaactatggaagctctatcgaggtccatactcgttatctttatcgaaatggagcatttttggtagtgtga

SEQ ID NO: 2803 - DNA, 2565 bp, Glycine max
  source 1..2565: mol_type = other DNA
atggtagtagcagtggagaaaaccaacctcacttcacaatcacaatgcttcaaccgtgtttctgacaagaagaaagaaagatgcaagacacacatgaacaacgttaacccatgttgttttttgtttctcttatgtgtgtggagccttgttgtgctcccctcatgcgtgaggccagttttgtgtgaagatgaaggttgggatggagtggttgtgacagcatcaaacctcttagcacttgaagctttcaagcaagagttggttgatccagaagggttcttgcggagctggaatgacagtggctatggagcttgttccggaggttgggttggaatcaagtgtgctaagggacaggttattgtgatccagcttccttggaagggtttgaggggtcgaatcaccgacaaaattggtcaacttcaaggcctcaggaagcttagtcttcatgataaccaaattggtggttcaatcccttcaactttgggacttcttcccaaccttagaggggttcagttattcaacaataggcttacaggttccatacctctttctttaggtttctgccctttgcttcagtctcttgacctcagcaacaacttgctcacaggagcaatcccttatagtcttgctaattccactaagctttattggcttaacttgagtttcaactccttctctggtcctttaccagctagcctaactcactcattttctctcacttttctttctcttcaaaataacaatctttctggctcccttcctaactcttggggtgggaattccaagaatggcttctttaggcttcaaaatttgatcctagatcataactttttcactggtgacgttcctgcttctttgggtagcttaagagagctcaatgagatttcccttagtcataataagtttagtggagctataccaaatgaaataggaaccctttctaggcttaagacacttgacatttctaataatgccttgaatgggaacttgcctgctaccctatctaatttatcctcacttacactgctgaatgcagagaacaacctccttgacaatcaaattcctcaaagtttaggtagattgcgtaatctttctgttctgattttgagtagaaaccaatttagtggacatattccttcaagtattgcaaacatttcctcgcttaggcagcttgatttgtcactgaataatttcagtggagaaattccagtctcctttgacagtcagcgcagtctaaatctcttcaatgtttcctacaatagcctctcaggttctgtcccccctctgcttgccaagaaatttaactcaagctcatttgtgggaaatattcaactatgtggatacagcccttcaaccccatgtctttcccaagctccatcacaaggagtcattgccccacctcctgaagtgtcaaaacatcaccatcataggaagctaagcaccaaagacataattctcatagtagcaggagttctcctcgtagtcctgattatactttgttgtgtcctgcttttctgcctgatcagaaagagatcaacatctaaggccgggaacggccaagccaccgagggtagagcggccactatgaggacagaaaaaggagtccctccagttgctggtggtgatgttgaagcaggtggggaggctggagggaaactagtccattttgatggaccaatggcttttacagctgatgatctcttgtgtgcaacagctgagatcatgggaaagagcacctatggaactgtttataaggctattttggaggatggaagtcaagttgcagtaaagagattgagggaaaagatcactaaaggtcatagagaatttgaatcagaagtcagtgttctaggaaaaattagacaccccaatgttttggctctgagagcctattacttgggacccaaaggggaaaagcttctggtttttgattacatgtctaaaggaagtcttgcttctttcctacatggtggtggaactgaaacattcattgattggccaacaagaatgaaaatagcacaagacttggcccgtggcttgttctgccttcattcccaggagaacatcatacatgggaacctcacatccagcaatgtgttgcttgatgagaatacaaatgctaaaattgcagattttggtctttctcggttgatgtcaactgctgctaattccaacgtgatagctacagctggagcattgggataccgggcacctgagctctcaaagctcaagaaagcaaacactaaaactgatatctacagtcttggtgttatcttgttagaactcctaacgaggaaatcacctggggtgtctatgaatggactagatttgcctcagtgggttgcctcagttgtcaaagaggagtggacaaatgaggtttttgatgcagacttgatgagagatgcatccacagttggcgacgagttgctaaacacgttgaagctcgctttgcactgtgttgatccttctccatcagcacgaccagaagttcatcaagttctccagcagctggaagagattagaccagagagatcagtcacagccagtcccggggacgatatcgtatag

SEQ ID NO: 2804 - DNA, 2763 bp, Glycine max
  source 1..2763: mol_type = other DNA
atgtctctccccaaaaccctactttctctcttccttctcctcacgatccccctagtaaccgccgatgacgccgcggtgatgtcgaattttctcaaatccctcactccaccgccctcgggctggtctgaaacaaccccattctgccaatggaagggtatccaatgcgattcatccagccacgtgaccagcataagcctcgcttcgcattccctcaccggaacactcccctcggatctcaattccctctctcaactccgcactctctccctccaagacaattccctcaccggcaccctcccttctctctccaacctttctttcctccaaaccgtctacttaaaccgcaacaacttctcctccgtgtcccccaccgctttcgcctccctaacctccctccaaaccctcagcctcggctccaaccctgctctccaaccctggtccttccccaccgacctcacttcctcctctaacctaatcgacctcgacctcgccaccgtatccctcaccggtcccttgccggacattttcgacaaattcccttcccttcaacaccttcgcctctcttacaacaacctcaccggcaatttaccctcctctttctccgccgccaacaatctcgaaacgctctggctcaacaaccaggccgccggcttgtccggtaccctcctcgtcctctccaacatgtctgcattaaaccagtcctggctcaataagaaccagttcaccggttccataccggatttatcgcaatgcacggctttgtctgacttgcagctcagggataaccagttaactggtgtggttcccgcttcattgacaagtcttcctagtttgaagaaagtttctctggataataatgagcttcaggggcctgtgcccgtgtttgggaaaggtgtgaatgttactctcgatgggattaatagtttttgtcttgatactcctgggaattgtgatcccagggtgatggttttgctgcagattgccgaggcattcgggtatccaattcggttggcagagtcgtggaaggggaatgatccgtgtgatggttggaactatgttgtgtgtgctgccggaaagattattactgtcaatttcgagaaacagggtttgcagggtaccatctcccctgcatttgccaatttgactgacttgaggactttgtttctcaatggcaataatttgatcggttctatacctgatagtttgatcactttgcctcagcttcagactcttgatgtgtctgacaacaacctctctggattggttcctaagttcccaccaaaggtgaagttggtgactgcgggaaatgctttgcttgggaaaccccttagtcctggaggtggaccaagtggaactactccttctgggtcttcgaccggtggaagtggtggtgaatcctcaaagggtaattcttcggtgtcgccaggttggattgctggtatagttgttattgtgttgttttttattgcagtggtgttgtttgtgtcttggaagtgttttgtcaacaagctgcaggggaagttcagtagggttaaaggtcatgaaaatgggaaaggaggctttaaacttgatgctgtccatgtttctaatggatatggtggtgttccagttgagttgcaaagccagagcagtggtgatcgcagtgaccttcatgctttagatggtccaacattttctatccaagttcttcgacaagtgacgaataatttcagcgaggagaacattttaggcaggggagggtttggagtagtttataagggggtgttgcatgatggaacaaaaattgctgttaagaggatggaatctgttgcaatggggaacaaaggtcagaaagagttcgaagcagagattgcacttcttagtaaagttaggcatagacatttggttgctcttctagggtattgcatcaatggcaatgaaaggcttttggtgtatgagtatatgcctcaaggtacattaacacagcacctgtttgagtggcaggagcatgggtatgctcctttgacttggaagcaaagggtagtaatagctttggatgtagcgcggggggtggaatacttgcacagtttagctcagcaaagcttcattcatagagacttaaaaccctcaaacatactactaggcgatgacatgagagcaaaggttgctgattttgggttggttaaaaatgcaccagatgggaagtattctgttgagacacggttggctggaacatttggatatcttgcacctgagtatgcagctactggaagagtgacaaccaaagtggatgtttatgcatttggagtagttctgatggaacttatcaccggtagaaaggcattggatgatactgtgccagatgaaaggtctcacttggtgacatggttccgtagggtactaattaacaaggaaaacattccaaaggcaattgatcaaattctcaatccagatgaggaaaccatgggaagcatatatacagtggccgagctggcaggccattgcactgctcgcgaaccataccaaaggccggatatgggtcatgcagtgaacgtcttggttcctcttgtggagcaatggaaacctactagccatgatgaagaagaggaagacggctctggcggtgaccttcatatgagccttcctcaagctctacgaaggtggcaagccaacgaaggcacttcctcaatatttaatgacatttccatctcacaaacccaatcaagcatctcctctaaacctgcagggtttgcagactcctttgattcaatggattgccgttaa

SEQ ID NO: 2805 - DNA, 405 bp, Zea mays
  source 1..405: mol_type = other DNA
atgcgcaaacatcgaatcgtctcactcgtggctgccctgctcatactgcttgccctcgccgtatcgtccaaccgcaacgcacaggaggattccatggccgacaacaccgggacgttggtgggcggcatccaggacgtgccggagaacgagaacgaccttcacctccaggagctcgcccgcttcgccgtcgatgagcacaacaagaaggccaatgctcttctggggttcgagaagcttgtgaaggccaagacacaagtggttgctggcacgatgtactatctcactattgaagtgaaggatggcgaagtcaagaagctctacgaagctaaggtctgggagaagccatgggagaagttcaaggagctgcaggaattcaagcctgttgaagagggtgctagcgcctaa

SEQ ID NO: 2806 - DNA, 618 bp, Colocasia esculenta
  source 1..618: mol_type = other DNA
atggccttgatggggggcatcgtggatgtggagggagcgcagaacagcgccgaagtagaggagctcgcccgcttcgccgtcgacgaacacaataagaaggagaatgcgcttctgcagttctcccggcttgtgaaggcgaagcaacaggtggtttcgggcattatgcatcacctcactgtggaggttatcgaaggtggcaagaagaaagtgtatgaagccaaggtctgggtccaggcttggcttaactccaagaagcttcatgagttcagccccattggcgattcatcctcggttacgccagcagatctcggtgtaaaacgggatgcgcacgaagcggaatggctagagataccaacacatgatcctgtcgtccaagacgcagcaaaccatgcggtgaagagcatccagcaaagatccaatactttgttcccttatgaactgttggagatccttcatgcaaaggctaaggtgcttgaggacctcgccaaaatccatttgctactcaaacttaagaggggaagcagggaggagaagttcaaggtggaagtgcacaagaacattgaggggactttccatctgaatcagatggagcaagatcattcagactctggaaactag

SEQ ID NO: 2807 - DNA, 1434 bp, Bacillus thuringiensis
  source 1..1434: mol_type = other DNA
atggccatcgatagcaagactactttgcctaggcattcacttatccatacaatcaagctgaactctaacaagaagtatggtcctggtgacatgactaacggaaatcagttcatcatctcaaagcaggagtgggctactatcggagcctacatccagactggacttggattgccagtgaacgagcagcagttgaggacacatgttaacttgtctcaggatatctcaatccctagtgatttctctcagttgtatgacgtttactgttctgataagactagtgcagagtggtggaacaagaacttgtatcctttgatcatcaagtctgctaacgacatcgcttcatacggtttcaaggtggctggtgatccttctatcaagaaggatggatatttcaagaagttgcaggacgagcttgataacatcgttgataacaactctgatgacgacgcaatcgctaaggctatcaaggatttcaaggctagatgtggtatcttgatcaaggaagctaagcagtatgaggaagctgccaagaacatcgtgacatctctcgatcagttcttacatggtgatcagaagaagttagaaggtgttatcaacatccagaagaggttgaaggaagtgcagacagctcttaaccaggctcatggagagtctagtccagctcataaggagctcttggagaaagtgaagaacttgaagacaacattagagaggactatcaaggctgagcaggaccttgagaagaaagtggagtatagcttcttgttaggaccattgttgggattcgtggtttacgagatccttgagaacactgctgttcagcatatcaagaaccagatcgatgagatcaagaagcagttggattctgctcagcatgatttggacagggacgtgaagattatcggaatgttgaacagtatcaacacagatatcgacaacctttactctcaaggacaggaagcaatcaaggttttccagaagttgcaaggaatctgggctactatcggtgctcagatcgagaaccttaggacaacatcattgcaagaggttcaggactctgatgacgctgatgagatccagatcgaactcgaggacgcttctgacgcttggttggttgtggctcaggaggctagggatttcacacttaacgcttactcaactaactctaggcagaaccttccaatcaacgttatctcagattcatgtaactgttcaacaacaaacatgacatcaaaccaatacagcaatccaacaacaaacatgacatcaaaccagtacatgatctcacatgagtacacaagcttgccaaacaacttcatgttgtcaaggaactctaacttggaatacaagtgtcctgagaacaacttcatgatctattggtacaacaactctgactggtacaacaactctgattggtacaacaaccctccataa

SEQ ID NO: 2808 - protein, 587 aa, Bacillus thuringiensis
KDQQLFNAIMDAVNKMVDNKFLSYNLSTLNKTIEGLQGNLGLFQNAIQVAICQGSTPERVNFDQNCTPCNPNQPCKDDLDRVASRFDTANSQFTQHLPEFKNPWSDENSTQEFKRTSVELTLPMYTTVATLHLLLYEGYIEFMTKWNFHNEQYLNNLKVELQQLIHSYSETVRTSFLQFLPTLNNRSKSSVNAYNRYVRNMTVNCLDIAATWPTFDTHNYHQGGKLDLTRIILSDTAGPIEEYTTGDKTSGPEHSNITPNNILDTPSPTYQHSFVSVDSIVYSRKELQQLDIATYSTNNSNNCHPYGLRLSYTDGSRYDYGDNQPDFTTSNNNYCHNSYTAPITLVNARHLYNAKGSLQNVESLVVSTVNGGSGSCICDAWINYLRPPQTSKNESRPDQKINVLYPITETVNKGTGGNLGVISAYVPMELVPENVIGDVNADTKLPLTQLKGFPFEKYGSEYNNRGISLVREWINGNNAVKLSNSQSVGIQITNQTKQKYEIRCRYASKGDNNVYFNVDLSENPFRNSISFGSTESSVVGVQGENGKYILKSITTVEIPAGSFYVHITNQGSSDLFLDRIEFVPKIQ

SEQ ID NO: 2809 - protein, 1257 aa, Solanum lycopersicum
MEKRKDIEEANNSLVLFSALSKDIANVLIFLENEENQKALDKDQVEKLKLKMAFICTYVQLSYSDFEQFEDIMTRNRQEVENLLQSLLDDDVLTSLTSNMDDCISLYHRSYKSDAIMMDEQLDFLLLNLYHLSKHHAEKIFPGVTQYEVLQNVCGNIRDFHGLILNGCIKHEMVENVLPLFQLMAERVGHFLWEDQTDEDSRLSELDEDEHNDRDSRLFQLTHLLLKIVPTELEVMHICYTNLKASTSAEVGRFIKKLLETSPDILREYIIQLQEHMLTVIPPSTLGARNIHVMMEFLLLILSDMPKDFIHHDKLFDLLAHVGTLTREVSTLVRDLEEKLRNKEGNNQTNCATLDLLENIELLKKDLKHVYLKAPNSSQCCFPMSDGPLFMHLLHMHLNDLLDSNAYSISLIKEEIELVSQELEFIRSFFGDAAEQGLYKDIWARVLDVAYEAKDVIDSIIVRDNGLLHLIFSLPITIKKIKLIKEEISALDENIPKDRGLIVVNSPKKPVERKSLTTDKIIVGFEEETNLILRKLTSGPADLDVISITGMPGSGKTTLAYKVYNDKSVSRHFDLRAWCTVDQGYDDKKLLDTIFSQVSGSDSNLSENIDVADKLRKQLFGKRYLIVLDDVWDTTTLDELTRPFPEAKKGSRIILTTREKEVALHGKLNTDPLDLRLLRPDESWELLDKRTFGNESCPDELLDVGKEIAENCKGLPLVADLIAGVIAGREKKRSVWLEVQSSLSSFILNSEVEVMKVIELSYDHLPHHLKPCLLHFASWPKDTPLTIYLFTVYLGAEGFVEKTEMKGIEEVVKIYMDDLISSSLVICFNEIGDILNFQIHDLVHDFCLIKARKENLFDRIRSSAPSDLLPRQITIDYDEEEEHFGLNFVMFDSNKKRHSGKHLYSLRINGDQLDDSVSDAFHLRHLRLIRVLDLEPSLIMVNDSLLNEICMLNHLRYLRIRTQVKYLPFSFSNLWNLESLFVSNKGSILVLLPRILDLVKLRVLSVGACSFFDMDADESILIAKDTKLENLRILGELLISYSKDTMNIFKRFPNLQVLQFELKESWDYSTEQHWFPKLDCLTELETLCVGFKSSNTNHCGSSVVTNRPWDFHFPSNLKELLLYDFPLTSDSLSTIARLPNLENLSLYDTIIQGEEWNMGEEDTFENLKFLNLRLLTLSKWEVGEESFPNLEKLKLQECGKLEEIPPSFGDIYSLKFIKIVKSPQLEDSALKIKKYAEDMRGGNDLQILGQKNIPLFK

SEQ ID NO: 2810 - protein, 912 aa, Glycine max
MAYAAVTSLMRTIHQSMELTGCDLQPFYEKLKSLRAILEKSCNIMGDHEGLTILEVEIIEVAYTTEDMVDSESRNVFLARNVGKRSRAMWGIFFVLEQALECIDSTVKQWMATSDSMKDLKPQTSSLVSLPEHDVEQPENIMVGRENEFEMMLDQLARGGRELEVVSIVGMGGIGKTTLAAKLYSDPYIMSRFDIRAKATVSQEYCVRNVLLGLLSLTSDEPDYQLADQLQKHLKGRRYLVVIDDIWTTEAWDDIKLCFPDCDNGSRILLTTRNVEVAEYASSGKPPHHMRLMNFDESWNLLHKKIFEKEGSYSPEFENIGKQIALKCGGLPLAITLIAGLLSKISKTLDEWQNVAENVRSVVSTDLEAKCMRVLALSYHHLPSHLKPCFLYFAIFAEDERIYVNKLVELWAVEGFLNEEEGKSIEEVAETCINELVDRSLISIHNVSFDGETQRCGMHDVTRELCLREARNMNFVNVIRGKSDQNSCAQSMQCSFKSRSRISIHNEEELVWCRNSEAHSIITLCIFKCVTLELSFKLVRVLDLGLTTCPIFPSGVLSLIHLRYLSLRFNPRLQQYRGSKEAVPSSIIDIPLSISSLCYLQTFKLYHPFPNCYPFILPSEILTMPQLRKLCMGWNYLRSHEPTENRLVLKSLQCLNELNPRYCTGSFLRLFPNLKKLEVFGVKEDFRNHKDLYDFRYLYQLEKLAFSTYYSSSACFLKNTAPLGSTPQDPLRFQMETLHLETHSRATAPPTDVPTFLLPPPDCFPQNLKSLTFSGDFFLAWKDLSIVGKLPKLEVLQLSHNAFKGEEWEVVEEGFPHLKFLFLDSIYIRYWRASSDHFPYLERLFLSDCFYLDSIPRDFADITTLALIDIFRCQQSVGNSAKQIQQDIQDNYGSSIEVHTRYLYRNGAFLVV

SEQ ID NO: 2811 - protein, 854 aa, Glycine max
MVVAVEKTNLTSQSQCFNRVSDKKKERCKTHMNNVNPCCFLFLLCVWSLVVLPSCVRPVLCEDEGWDGVVVTASNLLALEAFKQELVDPEGFLRSWNDSGYGACSGGWVGIKCAKGQVIVIQLPWKGLRGRITDKIGQLQGLRKLSLHDNQIGGSIPSTLGLLPNLRGVQLFNNRLTGSIPLSLGFCPLLQSLDLSNNLLTGAIPYSLANSTKLYWLNLSFNSFSGPLPASLTHSFSLTFLSLQNNNLSGSLPNSWGGNSKNGFFRLQNLILDHNFFTGDVPASLGSLRELNEISLSHNKFSGAIPNEIGTLSRLKTLDISNNALNGNLPATLSNLSSLTLLNAENNLLDNQIPQSLGRLRNLSVLILSRNQFSGHIPSSIANISSLRQLDLSLNNFSGEIPVSFDSQRSLNLFNVSYNSLSGSVPPLLAKKFNSSSFVGNIQLCGYSPSTPCLSQAPSQGVIAPPPEVSKHHHHRKLSTKDIILIVAGVLLVVLIILCCVLLFCLIRKRSTSKAGNGQATEGRAATMRTEKGVPPVAGGDVEAGGEAGGKLVHFDGPMAFTADDLLCATAEIMGKSTYGTVYKAILEDGSQVAVKRLREKITKGHREFESEVSVLGKIRHPNVLALRAYYLGPKGEKLLVFDYMSKGSLASFLHGGGTETFIDWPTRMKIAQDLARGLFCLHSQENIIHGNLTSSNVLLDENTNAKIADFGLSRLMSTAANSNVIATAGALGYRAPELSKLKKANTKTDIYSLGVILLELLTRKSPGVSMNGLDLPQWVASVVKEEWTNEVFDADLMRDASTVGDELLNTLKLALHCVDPSPSARPEVHQVLQQLEEIRPERSVTASPGDDIV

SEQ ID NO: 2812 - protein, 920 aa, Glycine max
MSLPKTLLSLFLLLTIPLVTADDAAVMSNFLKSLTPPPSGWSETTPFCQWKGIQCDSSSHVTSISLASHSLTGTLPSDLNSLSQLRTLSLQDNSLTGTLPSLSNLSFLQTVYLNRNNFSSVSPTAFASLTSLQTLSLGSNPALQPWSFPTDLTSSSNLIDLDLATVSLTGPLPDIFDKFPSLQHLRLSYNNLTGNLPSSFSAANNLETLWLNNQAAGLSGTLLVLSNMSALNQSWLNKNQFTGSIPDLSQCTALSDLQLRDNQLTGVVPASLTSLPSLKKVSLDNNELQGPVPVFGKGVNVTLDGINSFCLDTPGNCDPRVMVLLQIAEAFGYPIRLAESWKGNDPCDGWNYVVCAAGKIITVNFEKQGLQGTISPAFANLTDLRTLFLNGNNLIGSIPDSLITLPQLQTLDVSDNNLSGLVPKFPPKVKLVTAGNALLGKPLSPGGGPSGTTPSGSSTGGSGGESSKGNSSVSPGWIAGIVVIVLFFIAVVLFVSWKCFVNKLQGKFSRVKGHENGKGGFKLDAVHVSNGYGGVPVELQSQSSGDRSDLHALDGPTFSIQVLRQVTNNFSEENILGRGGFGVVYKGVLHDGTKIAVKRMESVAMGNKGQKEFEAEIALLSKVRHRHLVALLGYCINGNERLLVYEYMPQGTLTQHLFEWQEHGYAPLTWKQRVVIALDVARGVEYLHSLAQQSFIHRDLKPSNILLGDDMRAKVADFGLVKNAPDGKYSVETRLAGTFGYLAPEYAATGRVTTKVDVYAFGVVLMELITGRKALDDTVPDERSHLVTWFRRVLINKENIPKAIDQILNPDEETMGSIYTVAELAGHCTAREPYQRPDMGHAVNVLVPLVEQWKPTSHDEEEEDGSGGDLHMSLPQALRRWQANEGTSSIFNDISISQTQSSISSKPAGFADSFDSMDCR

SEQ ID NO: 2813 - protein, 134 aa, Zea mays
MRKHRIVSLVAALLILLALAVSSNRNAQEDSMADNTGTLVGGIQDVPENENDLHLQELARFAVDEHNKKANALLGFEKLVKAKTQVVAGTMYYLTIEVKDGEVKKLYEAKVWEKPWEKFKELQEFKPVEEGASA

SEQ ID NO: 2814 - protein, 205 aa, Colocasia esculenta
MALMGGIVDVEGAQNSAEVEELARFAVDEHNKKENALLQFSRLVKAKQQVVSGIMHHLTVEVIEGGKKKVYEAKVWVQAWLNSKKLHEFSPIGDSSSVTPADLGVKRDAHEAEWLEIPTHDPVVQDAANHAVKSIQQRSNTLFPYELLEILHAKAKVLEDLAKIHLLLKLKRGSREEKFKVEVHKNIEGTFHLNQMEQDHSDSGN

SEQ ID NO: 2815 - protein, 475 aa, Bacillus thuringiensis
MIIDSKTTLPRHSLIHTIKLNSNKKYGPGDMTNGNQFIISKQEWATIGAYIQTGLGLPVNEQQLRTHVNLSQDISIPSDFSQLYDVYCSDKTSAEWWNKNLYPLIIKSANDIASYGFKVAGDPSIKKDGYFKKLQDELDNIVDNNSDDDAIAKAIKDFKARCGILIKEAKQYEEAAKNIVTSLDQFLHGDQKKLEGVINIQKRLKEVQTALNQAHGESSPAHKELLEKVKNLKTTLERTIKAEQDLEKKVEYSFLLGPLLGFVVYEILENTAVQHIKNQIDEIKKQLDSAQHDLDRDVKIIGMLNSINTDIDNLYSQGQEAIKVFQKLQGIWATIGAQIENLRTTSLQEVQDSDDADEIQIELEDASDAWLVVAQEARDFTLNAYSTNSRQNLPINVISDSCNCSTTNMTSNQYSNPTTNMTSNQYMISHEYTSLPNNFMLSRNSNLEYKCPESNFMIYWYNNSDWYNNSDWYNN

SEQ ID NO: 2816 - DNA, 1000 bp, Pseudomonas syringae
  source 1..1000: mol_type = other DNA
atgaacaagcgctacggcaacaacttgccgggatcctgttgcgcgctgagcaaccggatcgactggacgtcaccttcgcgcagcacgccatctggcaaaaaggccgccgttaatcgtttccaatatttctgcaggagtctgcccgtgaccaccttcaccgtgcccctgattctgtcggatgcaagccccacggcactcgccgctaccgcgcaacgtctgcgcgccgagcacgagacgcgctccttcgccgctgatgactgacatcaccgtgcccttccagctcggaatgcacttcgtcttcccagctttcctgatacggctgacgatacattttgcggaagtgattgcggatcaggttcagcgcgatgccacacagccaggtctgcggtttgctggcatgttgaaacttgtgctcgttacgcagggcttcaagaaacacgcactggagaatgtcatccacatcatcagggttcatcacccgcttttggataaacgccctgcagggcgtttatccaaaagcgggtgatgaaccctgatgatgtggatgacattctccagtgcgtgtttcttgaagccctgcgtaacgagcacaagtttcaacatgccagcaaaccgcagacctggctgtgtggcatcgcgctgaacctgatccgcaatcacttccgcaaaatgtatcgtcagccgtatcaggaaagctgggaagacgaagtgcattccgagctggaagggcacggtgatgtcagtcatcagcggcgaaggagcgcgtctcgtgctcggcgcgcagacgttgcgcggtagcggcgagtgccgtggggcttgcatccgacagaatcaggggcacggtgaaggtggtcacgggcagactcctgcagaaatattggaaacgattaacggcggcctttttgccagatggcgtgctgcgcgaaggtgacgtccagtcgatccggttgctcagcgcgcaacaggatcccggcaagttgttgccgtagcgcttgttcat

SEQ ID NO: 2817 - DNA, 1313 bp, Arabidopsis thaliana
  source 1..1313: mol_type = other DNA
atggcctctctattctcttcagttctcttgtctctttgtttactctcttcactttttctctcaaatgcaaacgctaagccaaaactaggcttcaccgcggatctaatccaccgtgattctcctaaatcgccgttctataacccgatggaaacctcttcccagcgtctacgaaacgcgatccaccgatccgttaaccgtgttttccatttcactgaaaaggataacacaccacaaccacagattgacctcacctcaaatagcggtgaatatctcatgaacgtatccattggaacacctcctttcccgatcatggccatcgccgacaccggaagtgatctcctctggacgcagtgcgcaccatgcgatgattgttacactcaagttgatcctctctttgaccctaaaacgtcttccacatacaaagacgtttcttgctcctcaagtcaatgtactgccctagaaaatcaagcctcttgttccacaaatgacaacacttgttcttactcattgtcttacggggataactcatacacaaagggtaacatcgccgtggataccttaacgctcggctccagcgatacccgccctatgcagcttaagaatattattatcggttgtggtcacaacaacgctggaacgtttaacaagaaaggctctggaatcgtcggactaggtggtggtccggtttcgcttatcaagcaacttggcgactccatcgacggtaaattctcatactgcttggttcctctaacttccaaaaaggatcaaacgagtaaaatcaacttcggaaccaatgccatcgtgtcgggatcaggagttgtctcaactcctctgatcgcaaaggcgtctcaagagaccttctattacctaaccctaaaatccattagcgtgggaagcaagcaaatccaatactcaggctcagattctgaaagcagcgagggaaacatcatcatcgattcaggcacaactttaacgttattaccgactgaattttactccgagctcgaggatgcggttgcatcctctatcgatgctgagaagaagcaagatccacaaagcggtttgagtctatgttacagtgcaaccggagatctaaaagttccagtcattactatgcattttgatggagccgatgtgaagcttgactcctccaatgcctttgtacaagtctcggaggatttggtttgctttgccttccgcggaagcccgagtttctccatatacggtaatgtggcgcagatgaactttcttgttggatacgacactgtttccaaaacggtgtcatttagccaacagattgtgcaaagatgtag

SEQ ID NO: 2818 - DNA, 1771 bp, Poncirus trifoliata
  source 1..1771: mol_type = other DNA
ttgagaggaatatatattgtagctgttggcgactaatagatgattgttaattattaatgaatcagatattgtgttttgtgttagatttagtgattgatgatcttttcagtgacacagcgacacaaataacatcaaatatgttaatttatagttttataccatatcgattcaaaaccaaatacagtaaaacgaactaatcgttcgtaggatgatacaatcttgcgaaatacaaaatttaattactgcttggtgcagtcagtcggtctaaatgacactgtttgttgttctatgtcatagccgactaaaaagttagtctgcattatattaccataaagttgcagactattggtggtacctttaaaaacagaacatacaatatccttcgaaaccttcacaaaaaagttggaacgactcaatttcacatctgcacctctgaaatgtattgtaacttcaggaacttgagatagtgaattaaaactgtagcaaagttcaaatgatcctttggggtctgcaacaggttgtgcctcaatcatactggacattactgacaacaattttgagttataaccttgtggcaataaggtaaatgttgtaccagaatcgattacaatgtctcttcctggagtcgatccagacataacttctagtctttggtttcctacactgattgcatcaattgtgagaacataagaggttttggctttagtcaagggagtagaaaccactcctgggcctgaaacaattccattggttccaaaattgattttggttgaggttgctggaaccaaacaataggagaatttaccagcaattgtagttcgcatttgagaaataagtgaaatatcgccgcctccaaggccaacaattccggttgtttttgaattaaacaagccaccattgtttgttccgcaaccaaaggttattccaggcagagccacggcctgtcctgttgttgaacccaaagtaacagtttcggtagcaagattgccatttgagaaggatccatctccataagagaccgagtattgacaatttaccccagagcaagatttttggctaagagatgcacattggcttgaggagcatggaagagatttgtaagtagatgactttttaggatcaaaaagtggagagtcctgcatgtaacattttgatggtgggcaaggctcgcactgcgtccatatgaggtcacttcctgtatcagcaacagctagtatttcagtagcgggagtaccaattgatatacgtatgagatattctcccctattgggtattatatcagcttgggaagcggctgatgaagatattgatgagttctgattaaagtgattaagacgattgagagaacgagtcaaagcatttctcaatcgttggtagggagtttcactggagttgtaaaagggagacttgggagagtcacggtggattagctcaacactgaaacctccagtttgagcttctattggagagacaacataaaaacaaagaaagaagagaatgaatgcacaactcaagaaggttgccataatcaaagctgtgattgaggtaataagaaagtggcaacgagtctatgcttatatagaggaggacacagagagataagttgcaaaatttaattaattttgaatagaagaccaaaaaaaaaaaaaaaaggaaagaaaatgagcttccaagaaaatgaaactttcttgtgtagtaagcttttgttatagtgacaattatcttatgggagggcctaagttacgttyaacgtaayttaygccctctcaca

SEQ ID NO: 2819 - DNA, 1426 bp, Poncirus trifoliata
  source 1..1426: mol_type = other DNA
atggcaaccttcttgagttgtgcattcattctcttctttttttttttttatgttgtctctccaatagaagctcaaactggaggtttcagtgttgagctaatccaccgtgactctcccaagtctcccttttacaactccagtgaaactccctaccaacgattgagaaatgcttttactcgttctaccaatcgtcccaatcactttaatcagaactcatcaatatcttcatcaaaagcttcccaagctgatataatacccaatatgggagactatctcatacgtatatcaattggtactcccgcgactgaaatactagcagttgctgatacaggaagtgacctcatatggacgcagtgcgagccttgcccaccatcacaatgttacatgcaggactctccacttttttatcctaaaaagtcatctacttacaaatctcttccatgctcctcaagccaatgtgcatctcttagccaaaaatcttgctctggggtaaattgtcaatactcggtctcttatggagatggatccttctcaaatggcaatcttgctaccgaaactgttactttgggttcaacaacaggacaggccgtggctctgcctggaataacctttggttgcggaacaaacaatggtggcttgtttaattcaaaaacaaccggaattgttggccttggaggcggcggtatttcacttatttctcaaatgcgaactacaattgctggtaaattctcctattgtttggttcaggcaagctcaaccaaaatcaattttggaaccaatggaattgtttcaggtccaggagtggtttctactcccttgattgttaaatccaaaaccttttatgctctcacaattgatgcaatcagtgtaggaaaccaaagactagaagttatgtctggatcgactccaggaggagacattgtaatcgattctggtacaacacttaccttattgccacaacgttataactcaaaattgttgtcagtaatgtccagtatgattgaggcacaacctgttgcagaccctaaaggatcacttgaactttgctacagttttaattcactatctcaagttcctgaagttacaatacatttcagaggtgcagatgtgaaattgagtccttccaacttttttgtgaaggtttcgaaggatattgtatgttctgtttttaaaggtaccaatmgtctgccactttatggtaatataatgcagactaactttttggtcggctatgacatagaacaaggaacagtgtcatttaaaccgactgattgcaccaagcaataattaattgggaagcttaatcgatattctccactctactagagtttgatcgagtgattttcaaaccactttctttagcagatcaaccgatttcaaattctaatgcgattggagctgaataaaatctatttaaataaatgta

SEQ ID NO: 2820 - DNA, 192 bp, Hyalophora cecropia
  source 1..192: mol_type = other DNA
atgaatttcgcaaagatcctatccttcgtcttcgctctggtgctggctttgagcatgaccagcgctgctcccgagcccaggtggaagatcttcaagaaaattgaaaaaatgggcaggaacatccgtgatggcatcgtcaaagcgggcccggcgatcgaggtcctcggttcggctaaagctataggaaaatga

SEQ ID NO: 2821 - DNA, 33 bp, synthetic construct
  source 1..33: mol_type = other DNA
aaaaaactgtttaaaaaaattctgaaatatctg

SEQ ID NO: 2822 - DNA, 45 bp, synthetic construct
  source 1..45: mol_type = other DNA
aaatggaaactgtttaaaaaaattggcgcggtgctgaaagtgctg

SEQ ID NO: 2823 - DNA, 219 bp, Medicago truncatula
  source 1..219: mol_type = other DNA
atggagaagaaatcactagcaggcttatgcttcctcttcctcgttctctttgttgcacaagaaattgtggtgactgaagctaagacttgtgagaatttggctgataaatacaggggaccatgctttagtggttgtgatactcactgcactaccaaagagaatgcagttagcggcaggtgcagggatgactttcgttgttggtgtactaaaagatgttaa

SEQ ID NO: 2824 - DNA, 495 bp, Raphanus sativus
  source 1..495: mol_type = other DNA
atggagaagaaatcactagctggcttgtgcttcctcttcctcgttctctttgttgcacaagaaattgtggtgactgaagccaaaacttgtgagaatttggctgataaatacaggggaccatgcttcagtggctgtgacactcattgcacaaccaaagaacacgcagttagcggcaggtgcagggatgactttcgctgctggtgtactaaaagatgtagcaacgcagcagacgaggtggcgacgccacaagacatggctaagtttgcttctatcattgtccttctcttcgttgctcttgtcgtttttgctgctttcgaagaaccaacaatggtggaagcacagaagttgtgtcagaggccaagtgggacatggtcaggagtctgtggaaataataacgcatgcaagaatcagtgcattcgacttgagaaagcacgacatgggtcttgcaactatgtcttcccagctcacaagtgtatctgttatttcccttgttaa

SEQ ID NO: 2825 - DNA, 243 bp, Arabidopsis thaliana
  source 1..243: mol_type = other DNA
atggctaagtctgctaccatcgttactcttttcttcgctgctcttgttttctttgctgctcttgaagcaccgatggtggtggaagcacagaagttgtgcgagaggccaagtgggacatggtccggagtttgcggaaacagtaacgcgtgcaagaatcagtgcattaaccttgagaaagcacgacatggatcttgcaactatgtcttcccagctcacaaatgtatctgctacttcccatgttaa

SEQ ID NO: 2826 - DNA, 24 bp, Brassica oleracea
  source 1..24: mol_type = other DNA
ttttggcagaaaatgagctttgcg

SEQ ID NO: 2827 - DNA, 21 bp, Photorhabdus sp.
  source 1..21: mol_type = other DNA
tggaactggagcaaaagcttt

SEQ ID NO: 2828 - DNA, 30 bp, Urechis unicinctus
  source 1..30: mol_type = other DNA
gcggcgggcatgggcttttttggcgcgcgc

SEQ ID NO: 2829 - protein, 437 aa, Arabidopsis thaliana
MASLFSSVLLSLCLLSSLFLSNANAKPKLGFTADLIHRDSPKSPFYNPMETSSQRLRNAIHRSVNRVFHFTEKDNTPQPQIDLTSNSGEYLMNVSIGTPPFPIMAIADTGSDLLWTQCAPCDDCYTQVDPLFDPKTSSTYKDVSCSSSQCTALENQASCSTNDNTCSYSLSYGDNSYTKGNIAVDTLTLGSSDTRPMQLKNIIIGCGHNNAGTFNKKGSGIVGLGGGPVSLIKQLGDSIDGKFSYCLVPLTSKKDQTSKINFGTNAIVSGSGVVSTPLIAKASQETFYYLTLKSISVGSKQIQYSGSDSESSEGNIIIDSGTTLTLLPTEFYSELEDAVASSIDAEKKQDPQSGLSLCYSATGDLKVPVITMHFDGADVKLDSSNAFVQVSEDLVCFAFRGSPSFSIYGNVAQMNFLVGYDTVSKTVSFKPTDCAKM

SEQ ID NO: 2830 - protein, 63 aa, Hyalophora cecropia
MNFAKILSFVFALVLALSMTSAAPEPRWKIFKKIEKMGRNIRDGIVKAGPAIEVLGSAKAIGK

SEQ ID NO: 2831 - protein, 11 aa, synthetic construct
KKLFKKILKYL

SEQ ID NO: 2832 - protein, 15 aa, synthetic construct
KWKLFKKIGAVLKVL

SEQ ID NO: 2833 - protein, 72 aa, Medicago truncatula
MEKKSLAGLCFLFLVLFVAQEIVVTEAKTCENLADKYRGPCFSGCDTHCTTKENAVSGRCRDDFRCWCTKRC

SEQ ID NO: 2834 - protein, 164 aa, Raphanus sativus
MEKKSLAGLCFLFLVLFVAQEIVVTEAKTCENLADKYRGPCFSGCDTHCTTKEHAVSGRCRDDFRCWCTKRCSNAADEVATPQDMAKFASIIVLLFVALVVFAAFEEPTMVEAQKLCQRPSGTWSGVCGNNNACKNQCIRLEKARHGSCNYVFPAHKCICYFPC

SEQ ID NO: 2835 - protein, 80 aa, Arabidopsis thaliana
MAKSATIVTLFFAALVFFAALEAPMVVEAQKLCERPSGTWSGVCGNSNACKNQCINLEKARHGSCNYVFPAHKCICYFPC

SEQ ID NO: 2836 - protein, 8 aa, Brassica oleracea
FWQKMSFA

SEQ ID NO: 2837 - protein, 7 aa, Photorhabdus sp.
WNWSKSF

SEQ ID NO: 2838 - protein, 10 aa, Urechis unicinctus
AAGMGFFGAR

SEQ ID NO: 2839 - DNA, 6393 bp, Tomato brown rugose fruit virus
  source 1..6393: mol_type = other DNA
gtatttttgttttacaacatataccaacaacaacaaacaacaaacaacaacattacaattactatttacaactacaatggcatacacacagacagctaccacatccgctttgctcgacactgtccgaggtaacaataccttggtcaacgatcttgcgaagcggcgtctttatgacacagcggtcgacgagttcaacgctcgtgatcgcaggcccaaagtaaatttttccaaagtaataagtgaggaacagacgcttattgctactagggcatatccagaattccagataaccttctataatacgcagaacgccgtgcattcgcttgccggtggactacgatccttagaactggaatatctaatgatgcagatcccgtacggatcactcacatatgatataggtgggaattttgcatctcatctgttcaaaggacgggcatatgttcactgctgtatgcccaatcttgatgtccgcgacataatgcggcacgaaggccagaaagacagtatagaattatacctttccaggcttgagcggggcaacaaagttgtcccaaatttccaaaaggaagcttttgacagatacgctgaaacgccagacgaagttgtctgtcacagtaccttccaaacgtgtacgcaccagcaggtggaaaacacaggcagggtgtatgctattgcattgcacagtatatacgatatacctgctgatgaattcggagcggcacttttaaggaaaaatgtccatgtttgttacgccgccttccacttttccgagaatttacttctcgaagattcacacgtcaaccttgacgaaatcaacgcgtgtttttcgcgtgatggagacaagctgactttttctttcgcatctgagagcactttaaattattgtcatagttattctaatattttaaaatacgtgtgcaaaacttacttcccggcatctaatagagaggtctacatgaaggagtttttggtcaccagggttaacacctggttttgtaagttttctaggatagatacttttttattatacaagggggtagcccacaaaggtgtaaatagtgagcaattttacagcgcaatggaagatgcatggcactacaaaaagactcttgcaatgtgtaacagcgagaggattcttcttgaagattcctcatcggtcaattactggttcccaaaaatgagagatatggtcatagttcctctattcgacatatctctcgacaccagtaaaaggacccgcaaagaagtcttagtgtcaaaggattttgtattcacagttttaaatcacattcgcacttatcaagccaaggcacttacatactccaatgttttatcctttgtcgaatcaattcgttcaagggtaattatcaacggagtgactgccaggtctgagtgggatgttgacaaatctcttttgcaatccttgtccatgacatttttcttgcatactaagcttgccgttttaaaagacgaattgttaatcagcaagtttagtttggggccaaaatcagtaagccagcatgtatgggatgagatttccctggcttttggaaacgcatttccatcgatcaaggagagactgctaaatcggaaactaattaaagtgtcgggagacgcattagaaatcagggtgcctgatttatatgtgacttttcacgatagattagtgactgagtacaaaacatcggtggatatgccagtgcttgatatcagaaagagaatggaggagactgaggttatgtacaatgcattgtctgagctatctgtgctcaaggagtcggacaagttcgacgttgatgttttttcccggatgtgccagactttggaggtagacccaatgactgcagcaaaggttattgtggcagtgatgagcaacgagagcggactgactcttacattcgaacagccaactgaagcaaatgtcgcattggcacttaaagattcagaaaaagcctctgagggtgcactagtggttacttctagagatgttgaagaaccatccatgaagggttcaatggcaagaggagagttacaattggccggtctgtctggagaccaaccagagtcttcctatactcggaacgaggaaatagagtcattagagcaattccacatggcaacggctagttcgttaattcggaaacagatgagttcgattgtgtacacgggccccattaaagttcagcaaatgaaaaactttattgatagcctggtagcatcactctctgctgcggtgtcgaacctagtcaagatcctaaaggatacagctgctatagatctcgaaacccgtcagaagtttggagtcttagatgttgcgaccaaaagatggttaattaaacctttagccaagaatcacgcatggggcgttattgaaacacatgctaggaagtaccacgttgcacttttggagtatgatgagcatggagtggtaacttgcgacagttggagaagggtggccgtgagttctgagtcaatggtttattctgatatggcaaagctcagaacactgaggagattattaagagatggtgagcctcatgtcagcagtgctaaagtcgtcctagttgacggtgtcccgggttgtggaaagacaaaagagattctctcgaaagtaaattttgaggaagatctaatcttagtaccgggtaagcaggctgctgaaatgataaagaggcgtgctaatgcgtcaggaataattcaagccacaagagataatgttcgtactgttgattcatttataatgaattacggtaaaggaacacgctgtcagttcaaaaggttatttatcgacgaaggtctgatgttgcacactggttgtgtgaattttcttgtttctatgtctctgtgcgaaattgcatatgtttatggagacacacaacaaattccatacatcaacagagtatccggttttccgtaccctgcacattttgcaaaaatagaggttgatgaggtggaaactcgcagaactacgctgcgttgtccagccgacattacccactatcttaacagaaggtacgaaggatatgtcatgtgtacatcgtcggttaaaaagtcagtttctcaggaaatggtgagcggggccgcaatgatcaatcctgtatctaagccattgaatgggaaagttttgactttcactcagtctgataaagaggcgctgctttctcgaggatatacggacgtccatacagtacatgaggtacaaggtgagacatatgcagatgtgtcgttggtcagattgactccgacacctgtatctatcatcgcaggagatagtccgcacgttctcgtagctttgtcaaggcatacccaaacattgaagtattacaccgtagtgatggatcctcttgtaagtataattagggatttagaaaaacttagttcttacttgttagatatgtataaagtagatgcagggacccaatagcaattacaggtagactccgtgtttaaaggttctaatctttttgttgcagcaccaaagactggagatatctcagatatgcaattttactatgataagtgtctcccaggtaatagcaccatgttaaataactatgatgctgttaccatgaggttgactgacatttctcttaatgtcaaagattgcatattggatttctctaagtctgtggctgcaccgaaggatccgatcaaaccactgattccgatggtacgaacggcggcagaaatgccacgccagactggactattggaaaatttggtggcgatgatcaaaagaaactttaattcaccggagttatcaggaataatcgacattgagaatactgcatctttagtagtagataaattttttgatagttacttgcttaaagaaaaaagaaaaccaaataaaaatgtttctttattttgtagagagtctctcaatagatggttagagaagcaggagcaagtgaccattggtcagcttgcagattttgattttgtggatcttcctgccgttgatcagtacaggcatatgattaaagcgcaacctaagcagaagctggatacatcaattcaaagcgaatatccggccttgcagacgattgtgtatcattcgaaaaagatcaacgcaatcttcggtcctttgttcagtgagctcacaaggcaaatgctcgaaagcatagactcaagtaagtttttgttctttacaaggaagacgccagctcaaattgaggatttcttcggagatctcgatagccatgtccctatggatatcttggagttggatatttcgaagtatgacaaatctcagaacgagttccactgtgcagtagagtatgaaatatggagaagacttggattagaagattttctgggagaagtttggaaacaaggccacaggaaaactactcttaaagattacacagctggtattaaaacgtgtttatggtaccagagaaagagtggggacgttacaacattcatcggtaatacggtgattattgctgcttgtttagcttccatgttgcccatggagaaaataatcaaaggtgcattttgcggagatgacagtttactatacttcccaaaaggttgtgagtttcctgacatacagcatacagccaaccttatgtggaatttcgaggctaagctattcagaaagcagtatggttatttctgtggaaggtacgtgatacatcatgacagagggtgtattgtttattatgaccctttgaagttgatttctaaacttggtgctaaacacatcaaggattgggatcacttagaagagttcagaagatccctttgtgatgttgcaaattcgttgaacaactgtgcgtattacacgcagttggacgacgctgtgagtgaggtccataaaaccgcacccccgggttcgtttgtatataaaagtttagttaaatatctgtccgataaggttctttttagaagtttgtttatagatggctcttgttaagggtaaagtcaatattaatgagttcatagacttgtcaaaatcagaaaaatttcttccgtctatgttcacacctgttaagagtgtcatgatctccaaggttgataagatattggttcatgaagatgaatctttgtccgaagtcaatttactcaaaggtgtaaaactcattgatggtggctatgtacatcttgctggtcttgtggtgacaggtgaatggaatttgccagataattgtcgtggtggtgtcagtgtctgtttggtcgataagagaatggagagagcggacgaggcaactcttgcttcatactataccgcagcggctaagaaaaggtttcagttcaaagtcgttccaaattacaacatcactaccaaggacgcagaaaaggcagtttggcaagtactagttaatattagaaatgttaaaattgctgcgggttactgtccgctgtcattagaatttgtgtcagtgtgtattgtttataaaaatattataaaactcggtttgagagagaaaattacgagcgtcacggatggagggcccatggaactatcagaagaagttgttgatgagttcatggaagaagtcccgatgtctgtaaggcttgcaaaatttcgttcgaagaccggaaaaaagtttagtagtaaaagtgagaataatagtggtaataataggccgaaaccagacaaaaaccaaaggaaggaaaagggtttaaaagttagggttgagaaggataatttaattgataatgaattggagacttacgtcgccgattcagattcgtattaaatatgtcttacacaatcgcaactccatcgcaatttgtgtttttgtcatcagcatgggccgaccctatagaattaataaatttatgtactaattcactaggtaatcagttccaaacacaacaagctagaacaaccgttcaacggcaatttagcgaagtgtggaaacctgtccctcaagtcactgttaggtttcctgacagtggttttaaggtgtataggtacaatgcggtactagatcctctagttactgctttgttaggagctttcgatactagaaataggattatagaagtcgaaaatcaggcgaacccgacaaccgccgaaacgttagacgctactcgtagagtagatgacgcaacggtggctataaggagcgctataaataatttagtagtagaattggtcaaaggaacaggtttgtacaatcagagcacatttgaaagtgcatccggtttacaatggtcctctgcacctgcatcttgagataatcgagatgcttaaataacagattgtgtctgcaaacacacgtggtacgtacgataacgtatagtgtttttccctccacttaaatcgaagggtagtgtcttggagcgcgcgggacaaatgtgtatggttcatacacatccgtaggcacgtaataaagcgagggattcgaattcccccggaacccccggaggggccca

SEQ ID NO: 2840 - DNA, 11519 bp, Celery latent virus
  source 1..11519: mol_type = other DNA
aaaatttaaatttatgagcaagagaatatatacgattattgttgttttgtgctttcaggtttgctttcaaaatctccgaacacagcctacacaatcttcacataccttctcaacaaatccggcgatccccggtaccgacgctcttcaatttgaagaaaacgcaaacttaacttactctaccataaaatacaatattttaaagtttaatttaaattacaaacaatcaatcatgtctgtggtctctttcgggtcaatcacgagcatggacttcgatgctgcatgtctagcagctatgatcgaaacccctggtggctctattccaccaactccacaatcaccacccacttcaccagtggcggtgaaacaaaggaaaattttaaattttccaattgccaaaatcaggacaactcctgatgcatcttttgagatgtgtgtgaagttccccgagagcttcattgattccttctgtgctcaagcacagaaagaattaaaatattggcacgctgctattacgcagttgaaattctttggtggtgagacaccaaagactcttgaaaccttggtgaaccaaggtcaagctcacactcaccaagttattttaaacttggttaaaatccttgatagtgctccaaaagcaattcaaggaaagaaggagttggaaaatttcttccagctgagcccacatggaaacaattccaaagaaccaattgacgttagtcgaaaggtttatatggaaccgtgcaaaataagtccacgcaagcgacaagtgtgctcctgtgacaatgacgatgatgcacattatcattgttactattgtgatattgtgtgttcaagcaaaaatctattgcaagaacacgaaagggatttttgcgaggatgcacagtcagtgcaagcatttgggtataaacttgagagtccaaatgtctttgacccaccccatgtgacgcagcaaaggagtgttgcaccatctttgggaaaaactttggaatctcctgtgaaatctccagagcagtcaaagccaaacctggagaaaagtttcccactagtggaatcttccaccaacagtggcatgatcttctttggatcaatagctaccatggttccgtctcatattgaaaaatatgtgaggaattgtgaaactgagaatccgattgatgcagctgcatcaaatttggcgatgcaagaagctaaaagctctggcgctccttgtatagtagtgcatcataaggcactaccaggtggaaagaaagattttctttttcctcataactctcctcaagttgtgagaactgaaaccgaagagccaattgctggtaccattgatagaccaacaataaaacgtgctttatttacccgcattaagaagaaagcacaagaaatttgtgtgaacccagggggaaccatccagagaaaaacaaagcgatggttgcggccagcggaagttgcacaaattgtgcgagctacctctgatccacaacatccattgttcaaggtggacgttactcaaattattgaagttgttcatcctgtttataggactgaaagaactgaagttgtgcagcaatgcataacaaggggaacgtacaaattgatgtctaaagcccaacaacggaaggcacgagcaatgcgctcagctggaatgttagtgatcactgataacccaacaacgcattgggtatctgaacctcagaaaatgctagtggtaaaggaaaaactgagcacaacaaagcatgtgaaactccggaatgttgaagtgaatgctgaatctgaaatgttttggggaactaaaacaaaggagggaccctcgaaaacagccttaaagcgctgtaagcgtaacatcgatcgcttggctcttcttgatccgcaaatgggtgagtctgcgaatggtgaatgttggatgaacacctttaagcaccatttaaaagtggggagcattgatattcttccaaataaggttcgtttaccaaaccttaggtcggcattctcacgatggatacctttggttgattatgttgaaattttgaaatttcattgtaagtcacaaccaaagcttaaaagggttgtgatacctactccagttacttatctggaaggttctagatatcacattcatgttggttatagcaagaactgctcatggattacggtcgaacaactaattaggcaattgcagactctgttaacatcatccaaatatggagaacattttaagagagcaattgttggtggtgaaccggaagacaaattcacaccagtggttcctatagttgacgtggaaactgagagagctaaatctagcttggcaaaatggacaactgcgcaacagagatatatgggatctattagaacccgaatcaactcacaagcagaaaaacataaaatcgattcggaaaaaaagatctggataccaatgaggcacgacacgatggatatgttaactccaccatatcttttcgaaaatgggctgagaaacaacgaagttcaacaagtcggccaggttcttggagattctgtagatcgtgctggaaacagttcaggtcagagttctcaatgccaacaacaaaatgtggcgcttgcatccgaaggaaacaacgacaacgtgataaacgagagcgtgcgcagcattcaaaacttagttactgccaatatgcagttgcaagagcaatgcaaattgttgctcgcctcacacgaacaagctatcatggactccgtagaacacggaaacttggagattcagaagcacgatgtagaggtctcgcagaaaccatcaacgaggaaaagcgactcacagaggaatttgcaaaaattctcattgaagaaaatagtcgcctcagaagagatgtcgagaacattgggcagaggatggagaaaatctgtcacctcaatcggtgttccaattgtgagtgcttccattgcagaagctttaaatcaagtcgttcaaaggggaaatacttcctggcttgatgtaggcatttctggaacattgttgaagcaatgtactctttttgctacgagaacttttcaagcgtattgtagctacaaattagcacgaaacgtgctgacattaaccgtgggagaattgtatgataatgtgaaatcatacatcaactctataatgggttccacagatcctgaagtgactggtttcttgtcgcaagtacgtagcgcaccttcaatggtgaagatggccattttgctcacaatgtttgctatctcggtgaaattaatgagaaaattcttcaaggtgaagaataatggaactagctttactgtaagcggagagaatgtctctgcaagccagttgcgaatctcagcacaggctcaagctcgatcaactgacaacatgaccccaactgtaaagaagctttgtagcattcttggaatgattggtttggtttgttgttgttacgatagaacaacatgggcatatcaaaaggattggatggatgcttggatcacaagtatcacatatgccggtgcatctgatagtatttgggaatcaatttcccatccatttgaaacattgcataacattgcagtgagtggaggagatcgttcaccagaaactacagctcgtttggagcgaattttggctggtgcagggttgaacgcacaagcccaagcacttgatgaatttggagcgtctagctcagtgatgggtcagacactgcaaaacatattggatgaggttgaaagtacaaatgtgtcaatcgttagtgaaatgaaagcattgccacactaccaccgaaatgccactaccttcaatcaagcggctcgtgatttagtgactgaaccagatgcaacatatcaaatgttgttaacagcagcaactggtactggaaaatcaacgcttttcccagtgcacctaaggtcacaatctcaaaagagagtcttgctgctcattcctctcgttgcagcaacacatggagtttaccagcgacttaaaagtcaaagggtgaatgatattggttaccatgctgattcaatatctgaaaacccaaatgctaaattaatcatctcaacatatggacacatgtgtgtgaaattacttggtggtcaaaacccttttgatcaatttgattatattttagctgatgaatgtcatgttgtaacactcgagactgttacagtgatatcccatttactccaacagcgagaaatggcgacgtggaaaacagttttcatgacagcaacaccattcaacaatatcacacttaatagtgttgagacagaacagcctgtaatcatgcaacagaccgagcatttccacaaccccaaaagctttgtagattttctaaaagctggcggcactgaaagagtgcaaacatatgctaagggaggctgcatcgtattctgttctacccaaaaagaaactgaggaatcagcgaaagctcttaaagcgagtggggttattgcactcttttaccatgcctctaaccgattggaatgggattcctttgcaaagaaaaatgagcgaagcatgggacaattaaatttttatctctttgctacaaatgcactagaatctggtgtgacgatccctatgaaaagttgcgttgattttgtaactaaaatgcatccagtagttggtggagataggaagactattactatggctccaacttcaattagcattcaagagcaattgcagcgtcgaggtcgagttggacgaacttgtccaggtgggtatctatacacatcagttggaaccccgttgatgtataaacttgacccagattcatccattaagtacttgttgtactgttggaagagtggtatcaaatgttataaggaagcattaaatattcctgatgaatgcacgataacattcactaaagagaaaattggtgctatttggacacatgacacaccgccagttgttacagcagccttagtggataattttggtgcagtttacaggaatgcaaacttcttcttagcatcacatcgaagaaattatgtggaaattccacatacaactgatatgattctgccctcaactctctcgacatgggagaattttgaattggatgggaatgaagtatcagatggcacacgaatgagagtaccacaaaatcatttctttttccgaaacgaaagggtccaagagagttggttgaaattgcaagctgcaattcttactgaactaactgaagcagaagccactaagaagcgagatatagttatcgagaatctgatggcgcgtcgagtatcgggccatcctgcttcgaagcttgaaatagctagaatgataatggccaaacaacaagtggtacaacaagcaagagacacgaaacgtgttcgagaaacccttagtgagagtatatctgattactccggcatcttctcaaacttttctggaatattttcagttcaagaaagattgaaaaaggcttctatcaaggctaatgaggaattagatatggttattcaggaaaatgaatcccatattttatttctacaagacatgataaaagaaactcctgagatcatccctgatatggctttagaggagcagatccaacatatggaatatgcaaaagccatattggaaaatggttggatcagtgggaatcctcaagcaaagcttctcattatgcgcacaacgcataaaaattttcatgatcttgttacaaaaaccaaggatgggacctatcgcatgaaatcatatgtgcaacgcatgttcgattttgtgaagaaacatccattgttaatttttatgtccattatgatgggaacgtcattagcagcaggatacttcatgatgagtaaagactctgaagatgacgatgcaatagtgcaggacaaggttttcaaacgcaatgataaggcaatgctggaatggtgcttgagaggcaaagcatgtaaatgtgacgccacacacttcgaggcacagtatgtacttgattcacgtcattatagaactattctcgaagattgggtaaagttcccattgcgagggttccacaatatacaaatagtaaactatggcacagtgagcaaatatgcacgtgctctagctttcctatcagtttgtgcactcttagctaacccgactatggtgtataatagcgcagcacattccatggctggaaatagtgagtataatgagtcagtagcaaaatccctaatgcacaatattctaagagattggaatagagtcccgctcatagacttattggtaaaagggatagatggaagtgatgatcgttatgatcagtacatacatgaattatatacaagtggaggcctaattgcatttgaatcagacactggaaagtttgaaggaaaaatgtctattagtcaatatcgaaaggatgctgctaaaggacaaacaaaacgtagtgcagcttcacggtcacgtgaagaagatcattatgatccgagatcatcaggtcgactcaagagtgggatcagacgagcatatcgtcaattctataatattgaagattctgatgtgcaggaaattatcctcacaaacaagaaaggagctccaattcttaaaattgggagtcttgatgaattgaaccaacatgttgatcttctaaaattctcagatccagaattgtatgagttgtatttacatgctcgagataaattggatcttgacgaacctgaaagttcaagcggcttcactggaaagtggggtgactatgcggaagatgatgaattcatgaagatgatatcagctttagattcgttaacaaaacaagcttcggaggaagcatttataccagttcaagtgaaacttcgagatgggcgaactgtccaggcaaatgtcgcacgttattggcaaaaagattatccaactggaaaatctgtgaagcaatgggctcaaactacttgggctccaccacaattcacagctcttcgagaaagggtaggaaaagctcttgaactgattcctgaatcgcgaccaattcatcttcatggaaaagtcccaaatggaacacttatagagttccaagatgcaatgaaagatctgcacgagaagacagcagtcaaggctgtagctgaggctaaaatcggagatactcaatttgaggcggatccttctgatgtaacaagccgggttggtgtggttatggtgaaaacatcagcaaacgctgaatgggaatcatggaaccaatgtgttgctttgaataacatagtgatttttccccatcattacacgcttaaagatggtaataatttgagattcaagttttcatcaagtgatttcgaaagcacctgtcacattgtggatgggtacaatgggcttgacatggcttgggctccaattaacgttaaaattcgtggtttgaagaagaaagtttgtttaggcacgccgcggaatggatcttacctatggcatttttccatgattaatcaagggaaagatttgccagaggctcgtcttatgggatactcctctgtaacgaaagtacaagaagagtcgcacccatccttcgattggacacatacagtctcaacgcaagttgggaactgtggtggaccctttgttgataaacatggtgtcattgttggatatcacactggagcttttcaattgggacaatttaatactttcctgggattatcagcaccactaattgcacatctgacaaaattggatgtcaaaccaagtgcccagccccaatcaaagatgatttggagggaagtggatttttatcgatcaccaaattacttacccccaaccattaataaccaagagccaattccagaggagtggagatatccagaaggtaaatctgtttacccatgtgttgatccaggatggatgggttctcgtttggtgaagggatcaggttttcgtctcattggaaaaatgcaacgtcatgtggaatattcaacgaagatttcccttaatgagcattttgacatgtggatgtctcaagagaaaactcaaaatgagttaactaggctgaacaaaaatcgtgtagagaaagggttagagaaagctttcatcagtcacacgatagcagctcagaacaaggaagctgcaattaaagatacgagcaagtatgctagaacaacgttgggaacatattcagaacctttgttgaaaagagcgactgctctgacaatccaaatgctcgaggagcatattaagctatgtaaacgccaaccactggatttagtctatggggatatggaatggaacacagcatgtggagcccagtacaatggattgaaatcagcatttagggatcaagttgttggcatcgagaatatggatgcttatggtcaatactgctgggagcgtttcaacgttccaaccgatcaatacaaaccatgcatttggacaaattcattgaaggatgagttacgaccaattgaaaaagtgaaggagaataaaacgcgcactttcactgcagctccaatcgagtttgtaattggtgctaaacaagctgttgatgcattcaatcatcaattcatggatgcacatttgaagctaccacataccgttggtattaaccaatggtcagggggttggcacaaactatacaagaagttgtatggtaaaaactttgtgtactcaagtggagatggaagccggtttgactcaagtccgtgtttctatatgttcgatgccttgtacacaatacgtacatattttgcagatcctgaaatacaccaggttctggagaatatctacttggaggtttgtcacactccaatagtgttacacgatgggaatgttgtgatgaagaatcatggaaacaatagtggacaatgttctactgttgttgacaatagtctcattatgatgattctatgttgcgcctcttatctagagcacactccagctaccatgcattccctcgatgcaataaaaagccattggcatttttgtgtgaatggagatgattatattggaggaatgtcaccattgttagcaagccatttgactaaagagaagatggcaaaaaccttcagtgacttccagttcatatatgagtggtctgattattcaccatcattatttgaacaagattatatgagtttaaaattcataaacattgttgaacgaaaaggacaaacaactggacaacagttaattgctccatggcgtgaagcatcacgacaactctccactttggctcacacatcaagtggtgcacctgaaatcaaattacaagttgctctaaccgagagggtgaaagcatgggttgataaagatttatttgatttcataacagaatactgcagatggctcgtggagtatttcgatagatttacgaacacgcaagcatggaatgaagctaagaagttatggtgggatgaacaacaaattttcaaccattatttcagttttgaaagcatttgcaatgcgccatactcacaaattgtaaacgaaactcctgatgagttctttgctaatggtgtgagagagtcccgaccattgcgaatcctacgcgatggcatcaaatttggtgttgctgttacagcagctaattatctgggaccaagcgatcacgatgtacccatgattgcaaacacaatgcttaatgttgccaagataggtctcgcaaattcaacagccgagcggattgaccgtatgctatttgggaaggaaaaccctgaacatagtagagcggattcgctagttgttgtaaaaacagagcaaacagatgcgacgatctgtttgcgaactcactgcaaatgccaagcacagcacttcgatgggaaatatgagtgttgggtgagttccccatctgttgctataaaaatgtttgcaacattaaagccccggattctttccacaacgaaatttgttggagttaagtttctaccaaaaatactaagagctcatgtatgggccttatacctatctggattctcttgggaagaaacaatgcaaattgtgcaaagtcactaccctggcgagaaacagcaaagaaaagcggattggttcctacagcaactgctgaaagagctagtattgatattcaaagtgaaagggtcgaagtttattgagttgggagagcatgctcaagttcaagggaaaactcaactcgactctacacaagttgatatggatccaaattttaatgctgcagcttatgctgcaactcttcgaggaggaccgcactggggtacacataattcccaaggtctgtttgatgctattaaggtattaaaccccaatgcagcaaatgttgacattgggaatgcgcgaactgcggttcagcgcgagatgcagcggttgatagctgccgatgctccgcgacaacaaccaccaccacaagttggtggaggacaccaacaaccacctccagctggaggtcaaacgcaaggccagcctggtggttacacaccgagccaggcatttaccaataaatttggtaatataatggctgagcccgatgcccccctcgtgctcgactctcaagcaacaatgagggaagttgcccaaattgaggcagcttgggctcgtcttctagaggtgcaatctctagagggtcttggttccttctggaactacatgttttcctatgtgggaaacaatggcacctcatctggaggtgatcccagggattacatccctgcaggaaatgggcgagttacacttgcccaactaaagtccaaagctcaaggtgagcaatggcgacgttattggcgtagtcatgcgtcagacatgagggatttcttgaggcttcttcaagcttcagatagacctttgcctattcgttgggcaagaaacaatggcattaaagatgccaattacgagattgcattcgattttgcggatgcactcccagatctctcagctgcacaaatgtcaattattttagcagctaagaaccttgccgtaaggcgaggtcaaggccagatgcttaatgctggcaccaaggttggaggtcggtcaagaaccgaaacctatgaccaggctgtccgcgatgctgcggatgtccaattcccaggagcataattttattatgcaacacaacactctttttgactggggggtgatgtgtctggacttgttacagtctttttctttttcaagtgatgtggaatggaccttgaatcaaataacatttgattttggattcacatcattaatcttcaatagggtggatggccctccccttttggagtcgtacaggacgtatcctgttttatttagtaacatagcaataaacacaaaccaccatgtagatagccgtttcagtggtttggttgtgtgtttttcatttctgtcagaaaacttccaaaaatacaaaaatataaaatttttattttgtcattttggttcgttgggcccaagcgtcttgcatagcatgtcgttcattcctgaaacgagtcccccgatagtttcacaattagtgtaccggacaccttttaaaatcattttcacactttgtgatgaatttgtaaggcgtgtgcgcgtgaaaccgtggtttggacctttggaaagaggctacgctctgtaggtagttttcgatagaaaatggtttcccttaaggaaactgttttgttactttggagttccggcccccaaagtaaatttt

SEQ ID NO: 2841 - DNA, 6552 bp, Black grass varicosavirus-like virus
  source 1..6552: mol_type = other DNA
cgccaatttcaaccctcccctacttccgattgtgatttttcatcgcatcgagacacccacaggtacagggtcctagtgtctctaacaccaactagaattaatggtattgattttatgtactaaattgtcatctgttctacaggagagacggcagagtttcccaagcacaagcgagatcaaggccacgcataagctcgacaacagagcgtgcaacatcacaagctcataaagctcaatggatactctggagcacgctgaagccaatgagctagaagacgatgattactttcttcctgacgaaggacctcttcatgatatgcacttggctagtgcaatcaacttggatcagatacaggagttgatgtatccagggactataaagtacaagatagatattccctattatttaagggatgagtacatgctgatagaaagtttgtgcaaaggagacaagatcaaaatggagcttggaatgttggctccatctttgaaactgtccaagcctggaggagaattgtcaaccatggatttacctgcatataaagaaataggaaaccttgtctgtcaggctttgaggaatagggacatcatgattcctatctccatgaatgatgtggcgctgaagctcccaggagtaatagtctacaggtcatggggtatagcatttgcagaattgttgaagattatatgcacaagagcagaagtgatgaggggagggtctcagcctgtatatcaaggcactggaattgaagcaggtgcagcacattgtcagtttcaagtcaacggcaattggtaccagatcgttgcgaggaagaatctctcaacactatatgacaggcaagagaatgtaatgtatataggaaatatacactcattgcttttgctaatggataccatcggacagaggatttgtttaatggttgccaatcagatagcagaactttatgatacacctggatgggttgatcaaggaaaaattgaccaaatattatcaactggagatgacattctggaagaaatgggaaatgatggatatgaaacaattgctatgtttgaatctcttgttataggaaaggtgttgagagcaactcccgatgacatcacagaatgccataagtttttgtacaactgtatggatgaggtagaaaacatgctactaaactctgctatgagaggaagaatcattgaacttgttcacagatggttggccatatttgacagtttatcgatcaaagagttatcaaatgtcttttgcttatatcgatgttggggacacccggttgtaaatatctatgaagggatggagaaagtttacgacatcggcactgaagagaaagaagttagcccatgggtagcaactgacatattgtgtcagttcagaaaaactttcttgataaattattacgagaagcatcactactatccaaacgtcttgatatcagaagaggtagaaaactcatatgttgctcaatgcattaagaagggttcttcaatagaggagatgtatcctacttatgatactaaggacttcttgggaatcgaaatccagaagatatgggacattccaataacatttgacctttgtcacattcttaatgataaagcagtatctccgaaccagaaggagctaacagacagtgttgtcaggtaccaaaacactacaggaggtcagaacagaagagggctccttagatggttgagaggaaagagcttaaactgcagagagttccttcgggagatagatcagaacgggctccctgaggatgagtgtatcattggaatgtacgagaaagagagagaaatcaagatcaaagccagaatgttttctctgatgtcagaaaggatgagatattacttcgttttgacggaagaccttatagctaagcacgtgctggagctatttcccgcaataacaatgaaagattcacaaaatgtactccaaaagaaattttggaccgttggcggaatgggaaaagactccacattcgacgttaatatcaacatcgatttttcgaagtggaattcgaacatgaggaatgaattaactcaacccatgttccaacagttggataagatcttcggatataccaatttgatatcaaggacccacgagatatttgaatcatcgtttgtatattcatcttcaggcaagtatgttcccactgtaaagtttggaaaactccaagaggatcctcctatggcatatcgtggacataagggaggctttgaagggttgagacaaaaaggatggactgtagctacagtatgtgccttatctgcaattgctgagagaagaaatgtgagaacaaaactgatgggacaaggagacaaccagatagttagaatactgatgcccacccagagatggaaatcaaatgagcttactatcaaagaaatgatccaaaatgccaaacagatccaaaaagcctttgtaaccgatatggagagaacatttgaagaggctaaattgcctatcaaggtgagagagacttgggcttctacgagactatttatgtatggaaagatgatcctacatgacggagatgcgatgccccaatggttcaaaaaagtgctgaggtcatacgctctaaccaatgagggtcaagtcactgtagcaggggtggtaggaactattgctactaacatggcttcagcggcaggattgagtgaaatgcctgatgtcatgtatctcatatttgtagcaatgactgagtggtcgctcggttacttgttagagtaccacccattcacacggaaatgcatcctaagagaacatgagtaccatgtaaagatccccggagcacatagaggaagagattatagggtgaggtcagttaacaagagaagattggtagtttctatgatcctgataccaacggcagctggaggaagtgtaacagttcctctccctggattcattatgaggggattccctgatcacgcctcagaggcttatgcctggatcaagatgcttgcggaagtaaagagtccatacaaaacaatgttaaagaactggtacactttcatcgggaatgattctatccaacctgatatgttgatccagagcccgtcatcaatcaacttcttgaagccgccaacacccagctttcaagggagaatgaacgtaagagagctcttattgtctggagaatttgatcagaaccagttcatcaaagaagcaggaacaatattgggagtctttgacaggaagaaggtctgctctgcgatgttaacagacccaatgaaccctttcataacctcagaggtttattccacttatgcccatgtgtacatagacggagtgataaaaagagtagaaaacaccagtactatcaagaagttggcccaaaaggtgaaaaccaagactcaagtcattaaggcaatgatgtacaatgaacataacttcatcatgttcataagttggagagcaatgaaaagaggtaccatcgactatgattgtgcaacccagcaagctagaatggctaggaatattggttggggaagaacaattactggtgtgaccacacctcatccagtagaattggggattggtcatatatgtaaaggtagacaagatgaatgtcctccaacggattacatttatgtcagaataaatgaaaagggagaatttgtcccttatcttgggtcaagaatcaagtgtaaagtcgtatcagagcaagatatagatgccagaagagagccactgattgctgtgggttcgcgtatatgcaggtactcgtcgtggcttggaattggcccaaatctgatggaaattgttgagaaaaacctagctgttgtctgtgacacatctgtctatgacaaatttatagacgatgatccaaagggactgttgtcatcaggatctattgatcatagattcactccagcaggagcatctgagggagttttcatcaactatgcaccacagattggttgtaatgtgtacatgtcgagcgattgtatgccgacctatggaagaggccagaccaactacactttgcacttccaggctctatattgttggctgcaatacatctcatcaaggagggctgaaagtgtattcatgcatcatcacatagagtgtgaagattgtgtcgtaccaactactgatgaagtccccgacatccagtgcccctttccctatttcgataatatatatcccccaagagtaagggacagcatatcaagagccttgggattcattgataggaaaggaggactagatattatgagcaatgtaagatcattgtgtcatgaagctgaaccaggcatgtttgatgttagacaattgcaaaagggagtgatgtggacactagcaataaagatcggatttcgattgtaccatgggggattattcgggtcagatgataccagagttgaggaccttcaggagtatcccaggatttactcatataaattatacagagataccttactggtcaatgtggcacatgtgatgatgatgcttgcagccatagagatggataaggcacctgatggtgaggaactcgcaaaagtcagaagaagagcaactgataaactgttgtcgaaacccattggaagcttcaaggggttaggaggattaactctaggaaggactgatgagaatccagataacagtcatttgtttatgactggctcattcccagaaactgtattctcaatattgaatacttccaagactgcattaatagagacaattggtcagattggacgcttatccatcgaaggaatgggccatcttcctgtggccaaaggttctctgtccaataagcagtttcgatttctgataatgatgagatgtttgttagaatgcaggaactctcattactttcaacactttcagaagatcccagaggacgaaccaggacatccagcggaccctcaaaatgacgtttatagaatgcttgtcaaaactcccgttctagatatgagtctagacaagatggtcaaatcacttgctgttattaacgaaagaaagactcttccgataatcgaatggaataacatctccttcgaatcaacagaagtgatctgcaggacaggaactcccaggtccatattcatcggaaatagaatgatcgttgagcaaaatagtagaagagagtacagagaagtaactcttccaacatctagcatttacaagtgggctgggatcttgtttcacaaacccttgaaaagacatatcattgtgttgggagatggaacaggaggaacctcactgttggtgaaaacattcaatcaagactctacagtgtacccttgctcctatttagaaacccataagattattccccaagatatggaatgtttaatgcctcaattgtctagaggatatgagggaatctccgggcgagttttgttaaatgttccagatgatatcaaggatcctctctggtcagaaagaatgtctagtgagataaatgacatgggcgttgaaaggacctctatagtctgcgatatagagaccgttgggctatgtgttctccttgatgcattcaggagtttacctcaaggagttcaagtagttatgaaaacctatgccaaagatatattgactaatatcatgtcaataatgggcttgaatcaggtagaggtgggattttctccgcatctgaaccagagcaaccatgaagtgtttctaatgggacacatctcacagaattcttttccagatcctgacatgatgatcaatcaaatggtaaagctttatggtaaggtgagagctgatccaagatccagaatcctggaggaaatgaggatgataaacaaagtattcaagccattaaagaatacgtctgtgtctctatctctagctcatataaataatctgggaattactatgaccagggagatattacaactggatggacttgagatctggggatatgcactgcaatttgtaaatcgtcattatgttgacccatctcatagagcatttcttgctgacaagaaaacgatgaacaggaaaagaaagagagatttgacaagggcattcaggatattgctaggagtggttgtgaatccaggatacctggatataaaacgcaaatggggtattagaactcccaaggaattcaaaccaagaggaatgaaccttatactagccagagattgtgatgatatgggtgtcaaattaaccaagaaggacaaattggcctctgaatgccttcattgcttttggaccaggaagatgaggaaagctcctctagatgcaccagatccaccgggggaagattggatggaaagtgcaacaagagttcgatcatttgccagcagtttatctgagcactcttctcatgattacatcaatgtcattgagacagagtagtaagttgttagtttccgtttgatgaagatggccagcagggtagaagaaaaaactatcaaacttggatacaagcagcagatcttatataaaacatagtatcattcgtaattattgcaccagagatgaatctaaatggcgaccctgtgacctatagcgtcattgataacgcggtcagattgcacgtggaacgcagcacgtatgggtttatgtttgaggcatgt

SEQ ID NO: 2842 - DNA, 11988 bp, Maize suscal virus
  source 1..11988: mol_type = other DNA
caggagtgagtttgcgtctcggttaacgttgttgtagccgtttgagagacaacgtatcgattccaacgccatattcttctcatactcatcaatctcacttgtcctctgtccgcccagacaccaacacaatcgaacatttcctctgatggctgaacagattaatcacgcagctccgcccaggcgacagccaagatggggtgcttcagctatgtcgaacttcagggtaaagacgaaagatctggctacacctgactctgcaaacactccggcccacatgattgggggcgattctcttcagctggtcttcacagataaagaagcccttactggtagattctttcttacatgcctgactctcgccaatgatgaagctgttactgcaccgcagacaatagcctactatttgtctgccatggctattgtatttccttcaatgaagcctgatgcccaggactggattaagcacgcaggttatcgtgttgagctagtagagactgaagaagatctggctgagatggaagaaatccaaccatggaggccaactccagagctagctatgatgtttgggcagtctgtcttgattgtgttcaagaatatctctgctgcaaattatctgacgtacatcagaagcagagtgaaggcattaaaagcccatgtgggtgcgttttctgattctattgatggtggagaagtcttcagtctggctaaagcaatggttatcagagctgcacttggaaacaacgtggagttcaagaagaaaatactgaatctcatgctggccactcgcgaagtcgctggagcttttccggcagcttgcaattatgtgtgtggaatcctggaatggaatgagatgacggcgattgtcatcatatacaagatgctacttctcaccagctcgccggtcattaatgataaggagatcagagatgaggtgcttcacctggctgttgcgtatgaaaagatcaaccaatttgagtatccccagtactttcgcattatggcttccaggagtagagcaagggtcctagagaggcatcactatcaggtcctcaccactgtcgctcaagtggcccagaaggaccagacaccatctcttgcccagtttgttgccagtgttcctgaaaacaatcttactgtgattcggctggtcaatatccatcgtcgtttcctggccaggactgcagaagacatacatctgaaggctgcagcattcctcactgcagttgaagaagaagatgttgatgaagaactccctcctcgtgcttgattaggacagtgaggttatacccaacagacatctaagctggtctctgcgatggtctttggcggctgagcgcctttttgtttttggtctacctcatgctttctcttttgctcttggtggtgagcagtcatctattagtctgtgagtcgttggttaatgtctcagtctttaatgctactagaaaaaagtgagaaacgacgaacttgaaagaaaaaatggagcggaccagcaagctagagcggctcattgcgtctagaagtctctcattcggagaagctttgatcgctcaatctctactaaactgtgcaggtcgagatcacttcatgtcatgtctgggagacactgagattgtgtttgtctgtaaccaaggagttgacccatctctggtgagaagactaatcaccaattgcaccaagaggagtgttgtgcttccatttcgcttacttgagttggccacttgctcgatactcacatccgcgggttatgcagcagcaactctctgtagtttaatcaacaaaatcctagctgggcgtgaaaacaggtttcttggagtgatgtacatctcatctggcattaacttcaacggcttctcatctccaggtgttttggcatggaccctccagtactgcggaccgctgatggtgagatctcaaagcgccagaaagacgcttggtctagtgttcgttgactcccaggtgtacagaacttccacagcctgtgtctttgtagactgccagtgggaagaagagattctgagtctaaccacagtcatcgaacgagtcaactcacataccatgaattatctgagttctgttgaaggcaaagctattttcaagcgtgctgccctagctgtttgcgcctatttcaatagtgctgcagactggtgaaggtcctggtgtaggtgaataaagtaagaagatagaagactgtgcacatgtaggagattcccctaataagggtatgtgtgatatttgcatgtctaggtagactgaatgtattgtaagtttgtcgtgcagcccacagccaacctctgatggcagcttgttgtctaactttgagccttcttggcagttggactaagaaaaagtgagagaccaagcgattactgtgtttctcaaccttgcgaaaaccggagctagttgacagcacgcgtgagttcaaggcgcaaactgcaatggcgagcggaagtgggctttcaggtcttacgagtgaaggtgtcgaaagcagaggaactagtggggatttggaagagctgccaggaggagggctgtccagagaagaattcgccacaggaggacaaaatttattggacattgctactcaagaccctcggtttgaccaggtcagggcacaatttgctgacggtgacgatgaagagggagacgtccctaccaatgaaaacacgttcgtgttcgggaccttttctgggtctccatctgccacccagcatactcaagccagggtcagatcaaatccagtgtttaaaaagaagagtggaggtgcaaatccatctgcaagcagcagctcagcaccggtacctccggtcgcagggaacccttttgggtcaccgcagccatcctcaggattgcctgctcagcaaccgcagctagcacaacagcccccaatgagtgcggctgctgcagcaattgccaagatggaagagcagatccacgcaatggtggctcaagtggattccactttgccacacggctacccatcggtggagtcagtcacgactgacactgagcggctcgctgcaatgatagctgacactccttatctttgccttgagacaattgattcgaagcatgttgtggcagctggaccatgggtcgtcaagataagctctgcccagctcaccctctctgcatatgaccagctgatcttgtctatcgctgggaggtactattcttgcttaccgatggcaccagcagatgatctcacagcacgatttttgcacatctgctcgcgatacggaggaggagaccaattcagatcgcaagaggtcgatgtggggctgaatgcttactggaatgaactgtcaagcgagggagttatccatctgccgactcttgcttccaaggttctgcttactggtgaagctatcgcggcacctcactattcagattctatgactctcgcagatctgaccaagagtttagatgaggtctggcaagtatatccaccgattcggacagtttataacatgtgctaccaagttgcccatgaaggattaaagtttgttagtcctcttcatgatgccttcaggtttaatgatgctgcggctttttatgtggaccggatagcttgcggttctgactatattcgattggagcatgttgtcattacaccaagggcatccaacctccaattcaaacaacctgaaatgcctttagttgtcccggtggcaaacccgccaccagaagcggccacaggagcaggagacatagctgcgcagacagcagctgcaactgggctggtctctgaaaggcgcagaaattctgcaagaactggagctgcaacttcaggcgccactgtgccgggatctggcactggtgcttctttagccgctgtcaatcaagacccagcgcagcctacccctgctgaccctcatagtttgctgaaccaagggttgcctgcacggcagccacctgtgcgagacacctcgaccttcagagatggtgtagtcgacttcaacggtgttttggttaaagttcatcagttattgtcaaaccaggcctcccaagatgcaaagttagaccttattatgcagaggctcagcaacattgaagccatggtggatggggttgacaaggcatttgctgcagtgataacacgccactcccgccaggatctgactcaccgccagacagtcaacagcactctgctccagccaagttcttcagaggcccagaatctcgccagcgggtctactccccctgctccacctcagaccaatcaggtccttgaaatcctaaagatcctggaaggaggtcatgccgacgagctgacccttgagctggttgctcggttgaaggctcttattcttgagaccggaaataccagggccgctcagaacatcaccattgagtcgatcaagtttgagaatgctaggaagaggactgttcagaggatcaaaagtctcttccaccttaactaagtgatgacctggtcagggtgtgggaattgctgtttcactaagcaatgactggtcaaataaatcagtttgagtcagtcggtcctaggtcgtgagccaagtgggtcaagtcagtctagttcctcagttcaagtcgtcgagtcttgggttatgctttggcagcccttcaaaaactagaaaaaagtgagagacttgagaataactttgccatcgtcctcctgcaacagctgagcgcactcttctcgccatggagacctttctagatgaacaatttgatgatatgctatctgaatttgagcaagcacggctgtctcggtttccagcctcacatcacagctcggctttaacatattatcctcaacgccatattctgtcattaatgtctccaaactgtcctgtgaaaccaactccccttctgcgggcatactgtgatgcggtcaataaagtatctgatctcttggggggtgggtgtgatgccacagacaacccagctccagtatactcttatatcttctctcagacaacggcttcttcgccagcctattatgacccagactatgaggatccatacctgctggattccctgcgagcagcctcagatgctgtgcttgaagatattgaagctatagaatctcatcatccgggtttttcgctggataaccagaagttgcgactgctgcggaaagtctcttcacgtctccatgcttcctgcaaacagatatttgcggtgcgaagaatgttagaaaaagttagaaatcaaatccagaaatgtcacatcggggttgatcacaagcttatgccagcagtgagattaggaaatttgagtatacacactgttagagatctcatcttcgtagccggactgcaaccattccccatgcgcatccatatactaaattacgatcagtggctaatgatctacgacacagtctgttgccgtgcaatggtaaaggtggcaactttatggaacgaggaattacgcactgacaatatcccttcatgggagatcgtgtcctcagtttataaatggggcgacgcacttttaaccaactatggtgtctcagcgtatgctattataggagaatttgaatcaatagtgactggtgtcttaattacgttttctgacactgacacactaggacttggtgcctcatttgtcaactcaataatggagaacgcgcaagagcaaagcagagcttataatatacctgcgaatgagacattgaagctgatatcattgcttagaactgttgagtctgtgaactggctgtcagagttgttcggtttgagaaagcattggggaaatccaatggtggacgcgcgagcatcgggaaaagcagttcaggagaaggtagatgaggtattgccagttaaagggactgcacttgtgaaattattggcatctttcaacaggatggttacactgtcattcatctctcagcatgggcaatggccggacggttactacctctcgaactcaagagactgcccgctgaaaagagccttcgaatcacggtctacccgtatcccagagactgtggaagggcatcgtcatgaagactgggcatgctttgtgtttctacccaactgcattttagactcatatgaagatgacctggcattaatatcagataaagctgtcagtgtgtaccgcgaacacttagattcagtctatgtgcgggctctctgtaataagcagagtcagggcacggttgaggaagacagaaggttgatgttagagtacttgaggaaacagcatatgccaatactggatattttcaaaatagtaatgacagacgcagtgccgccccgatggatggccaactgtgctagcatgaaaggaacagaaatgaagcacttgaaggcccgaatttttgcggtgcttacatatgagatgagacagtactttgctgcgtcagaagacatactgaagaacaacttatttaagtataacccgcatcagactatgactatgtcagaaacagagctattgactcgactaaaatcattaactactcaattggatccaaacagtcaaagccggcagctgagtgtaatccatattgttgatttttcgaaatggaatttgagaatgagatacactaatacatgcttggtattcaaatctatagacgatttcttaggaactccaggcttgtttgagaattctcatccactcttcagtgatatgctcaacatggtttcagacccattcaatcctccagcgttaggagtagaagagacagaatctgacactatttggagaaatcatcacgcggggtgggagggtcagcgtcagaagggatggacaatcttaacatctgcactcttgtctgacctggagagaacaaccggagttcatagtgaaatatgcggccaaggtgataaccaggcactactaagcaaatttcctgtccccactatctataggaatccggaagaatggatcaagagtgatcctacggaggttaggaaggtgcttgacgacttctatttgagattagaaaaggaatgtgaagctgtaggtctgaagataaaaacagctgagacctgtcgaagtctttgttttttcaactacgggaaaagactctatttcaaaggcagtgaactatccatgaccctaaaacggttctcaaaaaacataacccagcctaatgactcatacccaacaacagaggctattcttaagacatatgagggttcatcttatgcagctggcctttatagccatccaagtctgctgccatactggatgagtaaattctctgtagcccatcaattattcaacagcttcactaacaaccagctttgtgcagaagccccagtacagatgatgtccacctttgggttcccgatcaactaccgactgatcagcacgttgatgaagatcccagcatctctaggtggcccacctcagcagtgtctggctgattatctgctacgcggccatccagatccactatgcactgatttagtcgggttgacattgaagtcaaaggccgggtgtgtgatctctaagaagataattcgtctagctcaatctggtaaatggtttagccaacgcactctgaccagagattccctaatcaaatctccttattctctgaacctcagggtcccattatcagttcgacaaccaattgaagaggctgtgctcccggctgtgcgagctcactgcaacaataacttagtgaaatctctatttgatagctcgatggatgacgacgagagatatattcttgactctttaggtcttatgaagccgttccatccgctcgtggccaacgatatttattcaaggactttaccaggaagaagacagatgtttatatcaggactggcgaataccacgagcttaggtcgcctgattaaagggaattctgcgtttcctctgatctacaaagtcatggatttggagatggagcagctaaaaagctggatagtccagctaacagagcttctcggtttacctgataatgatgatattattcttcctcatcatatattagcgcaacagctgcgcgagaaatcgtggaatacagtcattgagggcataacagttccacatccgttagaacagttcatgcttactctatcaaaatcggacgtctgcaccaacgactgttatacagtagaacctgagcatattgtattggttcaacactccgaggatgtggttgtgtctcccggtgtggaccgtgaccacatcacagcagcgcggtcaaagaaagggagcccctatcttggcagccatatcggagaaggcattgtacagaagcagcttatttgtctaaatccagatacttcctggagagatgtcattagactaaacactatcaagcgttgggtggctccagaggggtctaggctgaggttgtttatgaatggaattataagctcgcggactaacatatctcgtgcctacatagatctcgccacaggcgttccgagtagattgtcttacaaccaccgggccagcctgatggggtcaataaacagctgctctatcagttcgaccacaaacatgcacacaaggttgtacttatcctcgaacagaatgggagattattctcatggtttgaaaaattatcacatgcctttcgggcccacctttctctgttatcagacgctcgtctgcttgatcgggatcttttcacctgagaaatgggcattccctagaaatgtttatcatattcatgtcagagactctagggtgccgccggtgtacgatggcgggttagagctagaagacctaactgtccttgatctgaaaggacacccgcctaccatccttaggtgcttagcctccaaactggtattcgaagcagcaccaggatatgcatcgttcggattttggtgtgagttcgaaacagcatcgaggactgatgcgaaatatgggtatgcccaacagctgacgggtggtttgttcattcaggagacggttgtaagagaatctataacacacgacaggattgggagctttgcatcgagaccggctgtcatatcaattggagacatctcattgatcgagccatctctattccttcgttccatcgcctggggtatgctgttgctcgcacctatgcatctgctgcatttcagaggcaaatatgcattcaaagtttcctgcgtggaatatgtcaatcttttcagccgagctttttggtcttcatttgaatccccaatgagcaacccccgaataattaggaagctcggaaagcatgtcgcgttgatgtctagtcatagtctaggtaggctagattccggcatcatcccagctctgcagataataatcgttgaagagatgtggtgtatcatacattcgatcgccacctatttccgtcgaggaggtgataaaccgaatatcccccccatctttgccccatcgggttctgctgccctactcctcacctcacgagtgatagaaatgatggtcactatacggctagtagttgggaactgcagcatcagtaagatagtagggttcccaagagatttctcggcaaatcttatgagtgtgccgcagccaatatctgccgcagctctgatcgtgatacaacatgacttcttagaattgcagcgtcacttgaaactgccattacgggacatggtgatacccagagtgttctcaacccattacccctgggttgatatcttaaggaagactgacagtgtggaggcagacgatgaagacccgcagaggcaattagtcctcccagtcgactttccgcagtgtgctaatgtagtagaatttcgtatccctgagaaccctgtgttggagactactccacaatgtgactgtaaaacgacacaaagaaagagagatttacatgatgaatgtttcttttcgctgagtgggaactatagcaaatcccacctcaaaattctggagttgatcttttcgttccacctgcctatagcaaatctctgcgtgcttggctctggcactggttctgaagcatgtgcgttaagtaattatctggactgcagacaggtttatgtgaattgctaccacaaactaactgacttctccccgcatgctgcttccacttatgttccgcctgcattcaggtctgatggtatagtgactaagctcgtctctccagcctctgctgtcctaagtctgtcagatctcacggacatcaggactgcggatgctatatatcagcacttaagaggtattgctacaactggtatcatttgcgatgcagagattccaagtgcagcaactcctttactctactcacagataatgcatacaatagtggcagttgtgaggaagaaagcctctatcaactgggtgttaatcaaagtgccgatcttctgtgttcataagcttcttggcctggcagctccactagctcaggccttccatagaatcatctttgcttatccagacttcgggaagcctcattcaagtttggtctatattgtcgctactattcgggctaaggcaactccaattgaagagaataggctgcctactgtaatgcttgaagacgagatgctcagagagatgttggcctctatcagcagtcagaaccattgtagattatatgagatgagggtagcggatagaataagtcggttaagccttaatctaacccttcctcaaagcttgactgtggcttcgaatcggtttgtgcaaggcctgatcctcactgaagacgaaatctccgacccggaacaagttataaaggtactgaaggctgtgaggcaagggttgttgacctcagcacagaaagtagttgaaactcatttccgagttcataatgaaatcacaatgccgaggtcagctgtcctctctgcggatttaggaacccttcacggacagttaaacaacacatacctgaaagtcgctaaatgtgatctgctgttagagctgttgcaccttattcatcctaccctcgaacagatcaagaatcgtgtgtacagctggttggctacagcccactcgtatagaatgagaaacaggaacttcaatgtctacatcaaccagaccagatttatatcacatgattctagatatttattcgaaatccttggacatcttatgaaaagatctgttcccacagttggactccccatccatatggattaccatttattcggatctaggacactgaggcctaagcaacttattgttccttgcccaataggcgtatgtcgaagtccatcaggtagaactagcaaatggaagtggcagaaacgaagtgagatacttggttgggcaatctcattaaccctcacaaatttaccgatagcagttgaggatcataatagcttttcgctggatttcctacacgaaaaaggcatcttagaagatgttcgcatgatggcctcattaaacccatcccgcatagaggtcccttacttctttaggcccaatgagatggccctcgatttgttggcgcatgaccggttgttccttgttgcgccgttgaattctttctcactactcagaagccgttacacaaccgttgagccatactttgttccttggtcgggggcccctttagcttggtgtctattttatctggaggagcggaaccaaattgatagcctgattgtggatgagatctgccttgatgatactctgtcggtcaacacttatgtcgacacagacagcatgtcctgtagatgcctgagctgcaaaacggaagaagtcttgggagagaggttttcgttaaataccaacgatctggatttcctgtgttctcttggatctatagagacagtctatgattctgagcatgctttgtaggggcttatcgctcgcagggactaataaaaagtgagtatgtgtaagctgagccaaagactgtatcgccagttttatctaaaagtttattgtgaacttaatttaaagttcctatctgttcccatttaataccattaagaatgtggtcccagctcacctcttgtctagtccaattaagctgcagattgtgttgggtatgacataggacatatgggagtgacaaagttgaggtaataggagaataaaagtggaatcgacagtagtatcggcttgtacaacgttgagcgagacgcaaactcactcctg

SEQ ID NO: 2843 - DNA, 7954 bp, Horseradish latent virus
  source 1..7954: mol_type = genomic DNA
tggtatcagagccatgagtattgaaaaatacataagatcttcggatcaatataacccaataacaaggttatacgaggtatatacgcatataccccggatcggcagcgtagagatacgttttgctaagtcatctacatacggtgtagaggacacatccgctaggatgagcatgtatactgccatcagatccgtttgatggtgcgcgtactaagtataactaagttatataattgttgaaaaacaaaatggatttatatccaaccaaagaggaagatacccctcaaaatcaaactgagaaatacgttttctcaaaagaagattcatctggatattcggctgaattaatggtcaataatgacttattaaaaactatttctaaaactaaattaactttagaaaaagaaaaagtttttagaatgacaaatcctttaacctcaatggttaaaagcctgtgtcagagaaagaaccacatattctattgcgtaactacgaaagagttatcaatagatatttgtgaatcttcaggtaaagtctacttacctcttctaacaaatgaagagataaatgggcgattaaccaaagtcgatccaaggatcagacaaacactctctattgttcatataggtgcagtgaagatattgctcaaagcgcaattcagaaacgggatcaactctcccgtcaaactcgctctcattgatgaccgaatcaatgaccgaaaagactgcctcctcggagcagcaagaggtaacttaaactacggtaaatttatgtttaccgtttatccaaaatttggtgtaagtttaagaactaaaaggttaaatcaaaccttaagctttattcatgaatttgagagaaataatttaatgaataaaggagataaagttatgaccataacctacttagtagcttatgcactaacaaatagtcatcacagcatagactataaatctagttctaatattgaattagaagatgttttccaagaaattggaaacgttgaacaatccgaattttgcattattgaaaatgaagattgtaattgggcaattgatattgcacaaaacaaagctgaattgggtaaaactaaaaagcttatatctgataatcaattaaaaattgaatcaggagaatctagtaatggtgaattacatagattaaatgaaagcgttaataaattacgcgaaaaatttgtagaaatttgtgggtagaatgagtgatctcaccaaacttccacacatctacaagaaaggtgaaacgatagttcgtttaaagccactggcaataaacaagaacgatcgggtatatgtgtttagctccgctaaatccaatatacaatcaatcaccaactccttgaataatctcaatgagattgttgggagaatactccttgggacttggaaaatcaattcattttttggattatccaaagatccctcagagtcaacctcaaaaaacccatctgtttttgataatgctaaaaccatttttaagagtgggggggttgataatacagcgttactaaaagaaatcaaaacccttttagaatcgcaaaacactaggattaaaaacctagaaaaccaatcgaaatccttgacggataagattgaacctgaacctttaaccaaggatgaggtaaaagacttaaaagagtcaattaggtttatccgagataagttgaaagacataatcggataaaactggcgaatctaaatcagattcaaaaggaagtatcccaagccttagaagagattaggtctctaaaaaaggatacagaagccattctagcaaaattaggatcaaccgaacctaacaacctagaagccattgccgcaaagataatcaatgacgttacgaaagtaatacgagattgtccttgtaacaaggaaattctggaagcttttgctaagcaaccagagaagaaaggtgaaataatcccttccaataaacctggatcttcttcatccaagttaaagaagtattcgtaccccaatactggagtaggaaactcaaacctaggtagttctgaaaaccctaaagcccttacctggccttttggatcatagaatgcctagaaccgtgggtcaaaccatagatgacttctggtcaaatctaggtgtaaaccagctagatgaacatgagttcgatcttatgatcaacctcatgaccgacgatgatgtatcctcggatacatcctttgatagtttaacctctctcttttctgagttattacaggttgaacaggaaatcacttcggaagaagaaagatgccaacttcttgaaaaagaagacagttctgacgaatccatacccaacgattctgatgaagaaagcgttcctgaacaagtcaggatggaaaaaggcaaaggaccggccaaaccatacgactacttcgacaacgaaagcagcgatatggaatatggagattacaatccatacggcagaagcgggcaaacaaacaaacccgcaagaacacgaccaaaattggccagtgaaacacttggacgaaatccaaggattctcaatctcgactgcaccaacagtctgagagacagaaaaagattagtagaagaatggggagccgaaatcagcctcaccatccaaactaatctagacgaatattccgaccctgacatggtgttactattaatggagcatctgacggccggaagtgtcaaatcgttcatcaagacaacgaaatggagtgaactatccggaggaatctatgaccttgtcatggaaggaattcacgtcatgtttcttggcgaacaaccaaatgaagctttcgacaaagctaaagaacaagcagcagcaaaggacaaactccttaagatgcagctctgtgatatatgttctctcgacacattcacctgtgccttcgagaaagcattatacaaactcgattccggagactttcctccaattatcgagcaatatctggcgaaaataccggaggtaggcgccaaagcccagcagcgatacaaagaagaagctactggagcaatgaaatacagtcttggatttgccaacaagattgttaaggaagaattgaagaaggtgtgcgagctcaccagacttcaaaagaaactgaagaaattcagaaaaacctgttgcaaacaggttgaagaaagattggaatatgggtgcaggcccatatacaaaaagaaatccaagcggaggaagcccaaagtccgcaaatacaaaaagtacaaaccctttaaacgacgaaagaagtttaaaacaggaaagtactttcggcccaaaaccgaaaagaaagtttgcccaaaaggcaaaggaaagaattgcaaatgttggatttgcaatgtcgaaggccattacgccaacgaatgtcctaatcgacaaacttctcagaaggctcacatccttcaagaagccattcaacttggtctccagccagtagaagacgtctacgaaggagaacaagaagtattcgttatcgaatacatagaagtttcagaagatgaaacctcaacctctgaagacgatggaacatctacttcagaagactcagattcagactgagcaggtgatgaacatcaccaacccaaactcgatttacatccgaggaaggctatacttctcaggatacaagatcgtggagctcgactgtttcgtagatacaggagcaagtctgtgtattgcaagcaaacacgtaataccagaagaaagatgggaagcagctcccagaaagatcaacgtgaagatcgccaatgaaagcacgatcacgctcgataagatatgtcgtaacctcgacatcatcattgccggagaacgattccacattgacgtcgtcttccagcaagaaagcggtatcgacttcatcatcggtaataacttctgtcaggagtactctcctttcatacagttcacaggacacattgtgttcacgatgaaagatcaataccaagtaccaatcacgaagctccgacgagctttcaagagaggaattcctggatttttagaatccatgaagaagagatcaacggctcaacaacctgaaccgctcaacatctctacaaataaaaccgtttcactttcaagggggaggaggtttggagaaaaactcagaatcacccaagaaaggatggtaaaaatcgaagaactacttgaaaaagtttgttctgagaacccattggacccagagaagtccaaaggatggatgcaagccagcatcaaactatcggatcccacgaaggttatcaaggttaaacccatgaaatatagcccaatggaccgagaagaatttgagaagcaaattcaagaattactggacctcaaggtaatcaggcccagtaaaagcccacatatggcaccagcgttcttagtcaacaacgaagctgagaaacgcagaggaaagaagcgtatggtggtcaactacaaagcaatgaatgatgcgactgtaggcgacgcatacaatcttcccaacaaggatgaactccttacgctcatcagaggaaagaaaatcttctcttcctttgactgcaaatcaggattctggcaagttaggcttgacgaagaatcaaaatccttaacggcgtttacatgcccacaaggacactatgagtggaacgtggtccccttcggcatgaagcaggcaccatcgatattccaaagacacatggatgaagcattcaaagtgtttaggaagttctgctgcatatacgttgacgacatcctcgtcttcagcgacaacgagcagaatcatcaacttcatgttgcgatgattctccagaaatgctatcaacatggcatcatactttccaagaagaaagcacagctcttcaaagaaagaatcaacttccttggcctggagatagatcaaggaacgcatagacctcaatcgcatatcttggaacacatccaaaagttcccagatatcattgaaagcaagctacagcttcaacgattcctcggagtactaacatacgcctccgactacatcccgaagctagctcaaatccgaaagcctctgcaagccaagctcaaggaaaacgttcaatggagatggactcctgaggacacattatacatgaagaaggttaaaaagaatctcaacggattccctcctcttcatcatccccttccagaagagaagctgattatcgagaccgatgcatcagacaactactggggaggtattctcaaagctattcatatagatttatctactaacgaatctattgaattagtttgcagatatgcatcaggcagcttcaaacctgctgagcaaaattaccatagcaacgataaagaaacgcttgcggtaataagaactattcaaaagttcagtatttatctgacaccggtaagatttctggtaagaacagataatacgcactttaagtatttccttaatattaattataaaggagattctaaaatgggtagaaatatccgatggcaaggttggttgcaaaactatgtctttgatgttgaccacattaaaggcactaacaattgcctcgcagattttttatcaagggaattcaatggagcttagcgcgtcttttgaaatccgtcaacagaaacgcgacacgcgtaaaagatgacaccatacacttgtggtgagaatcaataggccactgcctatataaacactctatcaccgatctgaaaaactcagatcctcaaaatggaggaaatagataaactcttacttcaagagaaaatcttattactagagctcgatctagtaagggcaaagataagcctagctagagccacaggctcgatgcaacaaaaggaagaaattccttgccgtgaaacaccggtaaatactctcacgagtaaattggttattatggagccagggcaatcgtccaaatctataactattccagagcaaacggctcatggtaaagaatcaacaaatccgttgatggctagtcttttgccaaaagagacaaaggtggtacagaccactagactggttaaaccagaggactttttacgtccaaacatgggtattccaatcccagaaaaagctgagcctagcagttcagttggtcctaacaggccagaaaaggagattcaaactcctcataacaactactatgttgtatataacggtccatatgccggtatatatgacaattggggttgtgccaagtctgcgacaaacggagttcccggagttgcacacaaaaagtttgccactattactgaggcaagaaagtctgcagacgagttcaccactgctgcaggaaaagataggcttaacttcgtccccaaaggcgaattagtcaagccaaagacttttgcaaaggccgtaacaagccctaaaaagtcaactcaatggatcactctcggaactaaaaagcctaagaaggatccagaaccaaaggagatcgcctttcaaccggagatcactattgaagacttccagtatctctatgatcttggaagaaaatacgatggcgaaggagacaccaccttcttcaccaccgacaagaagaacatatccatgttcaacttcctgaagaatgcagatccacagatgatctcggaatgctttcaagcaggactaatcaagacgatctaccccagtgcaaatctgcaggagatcaaatatcttcccaagaagataaaagatgcagtcaaaaaatacagaacaaactgcatcaagaacactgagaaagacatctttctcaagatcaagagcaccatcccagtctggagtgctacagggcttttacacaagcctaaatacatgatcgagatcggtgtctcgggaaaagttcgacctgaagaatctaagtccatggagtcaacgattcagaaggaagaattaatggaccttgcggtcttaaaggcgcaaacattcattgacagcctaatgaagatcaatcaacgcgaaaagatcttcgtcaacatggtagactatgaaacactagtctactcaaagaacttgaagaagacgactcaggaagacaggagcgtcatcaacaagtttcagcaaaagctgattagtggaaaaatccttggattccactctccagcaatctgccagcacataaaggtgacagcagaaaaagaagattgtgactaccactgcaatcagtgcgaatcttcaaaaggaaaggctatcgtttgcgataagcctgccgacagtggtccagccgacaatggagggccccagacacgtgaagacgcgtctgccgacagtgggtctcggacaacagacaccacgcactcagcaagtggatgaaataattcatctgctgacgtaagggatgacgatcaatcccactatcccaagacccttcacttctatataagtgaagttgcttcatttggagaaggcatctcgaaatctcaacacaactcgagctctcccttctctcttctttatctctctaaatgtgtgagtagaatcccgataagggaataggtagctacagagatcccggcctacgggccaattaaggggatctcctaaaatgtttgtattttcctttgtattatccagaaataaataaagaaaacctttacaaaaacccgagtgttctcccgcctttctctaaatctcatgtatctcaatagatactccgtctgaatagcaatcctccacgggacgctgtgagcctggagacctgatgccgtttgaagctgaagaagtaccgccgaggcagggggccgtttagggaaaaagtaagcgaggctggtttggcagcagtgactcaacctagggagtattcagatagacggaggtagatgaaagacaacgagaaaacaggaagttccgacggacactgttcaggtcagatttatttaaatctgttaatactctcattaaggagattaaccctaattagtggatctaaggggctacttataaacccttatcaatttaaaatcttgttaatcaagaaactaaacaagtggtttaaatgccacaaatcaaccttccgcagcacgaatctggtcgtgcaaaaat

SEQ ID NO: 2844 - DNA, 2613 bp, Bean latent virus
  source 1..2613: mol_type = genomic DNA
accggatggccgcgcgattttttttatcccttgatcctacggtcgcccgcaattcgcgcttggtccatgtgaatgtgataaaaagtgaccaatcatgtttcgtttgacgagtctaattattgtttcttcgtccccacgtgatggaccaagtgctttatatatttgaattaaatgcttatcctctttaattcaaaatgcctaagcgcgatgccccgtggcgcacaatggcggggacctccaaggtcagccgctccgcgaattattcgcctcgtggaggtatgggtccaaagatggacaaggcctctgcttgggttaacaggcccatgtataggaagcccaggatatatcgggtccaaagaggacctgacgtccctagaggctgtgaagggccttgtaaggtccagtcatttgaacagcgtcatgatatttctcatgttggtaaggtcatttgtatatctgatgtcacacgtggtaacggtattactcatcgtgtgggaaaacgtttttgtgttaagtctgtgtatattttaggtaagatatggatggacgagaatattaaattgaagaaccacacgaacagcgtcatgttctggttggtcagagacagaagaccatatggcacgcctatggattttggtcaagtctttaacatgtatgacaatgagcccagtactgccactgtcaagaacgatcttcgtgatcgttttcaagttttacacaggttctatgcgaaggtgactggtggtcagtatgctagcaacgagcaggctattgttaggcgattttggaaggtgaataatcatgtcgtgtacaatcatcaagaagcagccaagtacgagaatcacacggagaatgcgttactattgtatatggcatgtacgcatgcctccaatcctgtatatgctacgttgaaaatacgtagttatttctatgactcgatttccaattaataaatgttaaattttattgaatgatcttctattacatgagttacatatggtctgtctgttgcgaaagcaacagctcgaattacattattaattgaaataacgcccaaattgtctaagtacaacatgactaaatgcctaaatctatttaagtaagtcgttccagaaactcgaatcaatgtcgtccagacttggaaatttagatacgctttgtgtagatccagagccctcctcaggttgtggttgaaccttatctggatgtggaatatcctcgtcaaggagaacggtggatcctctactcttgttatcttgaaataaaggggatttggcacctcccagataaaaacgccactctctgcttgatgcgcagtgatgggttcccctgtgagtgaatccatgattgaagcagttgatgtgtaggaagatcgaacagccgcactccaagtcgattcttctacgtcggactgccctgcgttttgcaaaccggtgctgaggtttgatagaggggggagttgaggaagatgaatttcgcattatgaagcgtccacgcttttagatgtgcattctcttgtctatccaagtagtctttataactcgccccctctcctggattgcaaagcacaattgatgggataccacctttaatttgaactggctttccgtacttgcaatttgtttgccaattcttttgggccccgataagctctttccagtgcttcatctttaagtattgtggagcgacgtcatcaatgacgttgtaatctacattatttgaatagacaaaagaattgaaatccaggtgtccactcaagtaattatgagaacctaatgaacgtgcccacattgtttttccagttcttgaatcaccttcaatgatgatactaataggtctctctgtccgcgcagcggcaccccttccgaaataatcgtcagcccattgttgcatatccagtggaacgttgttgaacgacgattgtggaaatggaggaacccatggttccgggggtttttggaatatccttgttgcgtttgagaccagattatgatattgaaggaagaaatgttgaggttgttcttccttgattatctgcagagccgcttctgcagaacctgcatttaatgccttcgcgtatgtgtcgttagcagattgctgacctcctctagcagatctgccgtcgatttggaactctccccattcaattgtatctccatccttgtcgatgtaggacttgacatcggagctggatttagctccctgtatgttcggatggaaatgtgctgacctggttgtggagaccaggtcgaagaatctgttatttgaacattggtatttcccttcgaactggataagcacgtgtagatgaggttgcccatcttcatgtgtttctctgcatatcttgataaacttcttgttaactggagttgttagacgttgtaattgtgataatgcctcttctttggatatggaacactgaggatatgtgaggaagtagttcttggcatttaagcgaaagcgtttcgggagtggcatatttgtaataagaggggtgtacaccgattgaggctctctcaaaactgtcataatgaatcggtgtatggtgtacaatttatactagaaccctcaatctcaatttctgcacacgtggcggccatccgatataatatt

SEQ ID NO: 2845 - DNA, 2756 bp, Rice latent virus 1
  source 1..2756: mol_type = genomic DNA
atggcgaatttctctatcctcactgactcggcctaccctacggttccttcgcctccaagtcaagcggtgtcggccgggtttgaaggtgctctgacgacgcttttcctcgtcgttatcggctctctattgttcgttggcgtgttctatctcggctgggttctctgcgtgaaggacctcgtcctcaccttcaaggcccgccgccaaaggaggaccgaggagatcggtttcgggaacactcccgcgagggttgatgccaggggggtctaagagggcctcgtccgggaaagatggttcgaggccgaagcgtcgcaagggagagcccgaggccgcctttagggcccgcatattgggctgggcctcttcccagttcgggaggagggtctacggtggcgttggttcgtcgcagagtgctccgctgcaggtgcggacgtacaagtgggagaatccggacaagagtgccattgctatcgataccggctccatatggatcgtcaatacgttggacgctggtaacggggatgaccagagacatactcacaagactattatctacaagatgctgtttcagggtacgatgtggattaatgatgccacgtcggcagtctgcgggccactgacagttcatttctggctggtgtatgatgctgcgccgaagggggttcttcctgcccttactgacatattcgaggagggattctctggcctgggttcaacctgggtcgttaaccgggacaacgttcaccggttcgtggtgaagaggaggtggcagatgcgactgatgaccaatgggcagaagccgtactacactaaccgcagtgggaacggagatcccaccagtgtcacgatacgggacttcaggaagttcttcacgaagctgcgtactgcaacggagtggaagaactccgcaacaggagggataggggatataaagaaaggggccctatatctttgtgccatgtgttcgcaggcacctgaggggtccgctagagctattaacctgggggtgaagtttaggggccagagccgcatatacttcaaatgtaccggaaatcaatgataataaaacataatattttattcagattccatagatccgttattacaaggcagtacagtttgtacgacgaagcacagtatagcgacggatggagcactgtgcgtagcgtccggaggaggttggtagggcggtattagggaagaagggcaacatacaataccatacacacattattacacactaagcacccgaagggtgcttgaagaaactatccccttcatacatgtaatgtatcacgcagttgctttcgatgtacttggtctgagccggtgtacattgactcagccagtcttcgtcttcatttaccaggacgatggaggggatcccaccacttattaccttccgcttgccgtacttaggattgacggtgtagtcacggtgacatccgattagctgcttccaattagggcagtacttgaacgggatgtcgtctataacattgtattgtgcggtggggtcataagtggtgaagtccaccagtccgttccaatagttgtgcttcccgaggcttcttgcccaggttgtctttcctgttcgggttggtccgcatacatatagggaggtatatcttctggcggttgttggagcatcctggatgtcaaatcatggacgtgctgtagatattcggcagtagttacatcaagataatccatgttttgacgtgtttgtgtgtatacttcttcacataccgtgtatgtctttatgttctctgtggcccactgactcagctgttcgctgcaacgtagctgatcagtggggacagagcttgcgtatggagttacggtggtggggaagagcttctctgcgctgtactcgaactgggccagcctagttgcccagtcgaaggggaatgtctggcgtaccatagagaggtactctgttttcgaggtggacgaggagatgattttcctcatcttggtgtccttggtgtcagatccaggggccctcctcttgagggtcttcttgctgaacggtttggcgttgtagaattcgccccattctgcaatactgacggttcccggcttggtgatgtagtctctgacctgcttgcagttctgagcaggctgacagttaggatgataagactgatagtcaaaaaacctagagtctttggtctccaggcggttagatagctgtaaaagggtgtgtaggtgaaaggatccatctttgtgactctcacgagtaacaagtatgtagataggtacacgactgtggagcagagtaagaagatagtgaaggagttcccaaggatcaacaggacacttaggataggtgaggaagaagtacttggtccgtacgctgaattggtgggaagtggagggatcggccatgagtgaagcggagccgttggatttggctgaaagggacgtgcgggagaatcccggttgtccaaaggctgcttttcccacaaatctataccctagaccagtgcgatgtgggaagtgccttaggtgggaaccttgggccggctatttatatgggtgtcaaagtggctgtagttgggccttggcccactccagccgggggccggaaagcgaaatcgcactgatataatgttaccagtgcgatttctctttccgagcgcgatagcgcgaggcgccgggttccgcgtaccttctacgctgggtcgcctttatgtgtgatgggacgtaaggggggattcccattaatttattagtgcgctccatgacatcggggg

SEQ ID NO: 2846 - DNA, 2843 bp, Rice latent virus 2
  source 1..2843: mol_type = genomic DNA
atgtggatggaaagcggacacctaccgcaggtagggtatcaggtgcaaccttctccgccggccgtaacctcgacgttcgttggaaacgacggcgcctggaggtttctcgttttattgaccgcttgttcttgcctagcaggggcagccgtattcgcatgctggcgcatgtgtggtaaggacttgctcctgaccttgaaggcgaagcgtagcaggacgataaccgagctaggtttcggccagacgcctgaacagcgtcgagctggaacgagttctcaaccagtgggcgtcatcggctaacgatcgaggtggagtctggtcttttgggtctggtcagcgtcccagttggccctctagcccggcacggatgccggcgaggactggtagcgctcgtcgtaaacggaaggatgattgggcgtgggattcggccactcgtcgccgtgttcgtccgaggacgtcttatgttccccgtggtggtccgcgagttcgcaggcctagcctgcagtatgtgaatccggggttacttggttccaccgcggtacatgtggctgatacgaatggggaggttagaattataacaggatactcgcgcgggagcgacgagcagtcgcgtcataccaacgagactataacgtacaagttatcactggacctctatgtcacggtggacacagagtgccagaaatatgttggtaaaggcgttgcggtcgcatggttggtctacgatgcgcagcctacaggagagatgccggcagcatcgacaatattcccccatgttgcggatatggctactgcgccctgtacctggaaggtgggtagggaggtctgccatcgtttcgtggttaagcgtagatgggtgatcacgcttgagactaacgggcgtgtagccggtacggtctttcagggtgctaatggtgtcccaccatgtaatcgcacggtgtacttccataagttctgcaagagactcggtgtcagaactgagtggaagaacacctccggtggttcgatcggagacattaagacgggtgcccctgtacatagtgttcgcggcagggaaccagattaattacagagttcagggggttgtaagaaagtacttcaagtctgtgggtaaccagtaaaacggttacatgtaaaatagtttgtaataaaatgtcaattttattcattacaatacaggtggctgcgctaagcagctgttttgcaatacatacacactttacccaattatccctgggcggcgcgcggcgataagggaaaggggtaaacactaaacacgagactgaccttagttaacatctttccggcgctgttgcgccggtgtctgatataaagctgaaattatatagactcatattaaatatgatgcagttgctctcgaagtacgagagctgttcagcagtcattgctttaggccagtcgtcgtcatcgttaacgatgacaattgaagggattcctcctttgatgagcttctttttcccgtatttcggattaacggtgtaatccttctgagctccgacgagggccttccagcaaggacagaacttgaagggtatatcatctattatattatatagagcttcgggatcatacatcccgaagtctacgttattctggtagtaattgtgtctgccgaggcttctagcccaagtagactttcctgtccttgatggtccgcagatgtagaggctgattggtctcgcctgcttgcaaagcatgtatcatgtagccatcgtagatctgcctcagcgtcagaatgaggatggagcaacgaatatacctgcggggttacatggtagatgttctcggcagcccattctgtgagtgtttcatggcaatgaaacatggagtcattgaacggtggttcatatgttaccggtggatcaggaaatagcttctgagaagcatactcccaggcttgcagcctggcgcagtagtcgtacggaaaccacttcttgaccccgttcatgtactccatccttgaggtcgccgagcgtaggatgtcagccattatctggtctttagtcattcttcgtcgcttgttggccagctcggaggaggtgttacctccctcggccgagctggaggaatccccagcagctctcctaatcgtcgtagaaggtccagcctctccattcccagtcggaggaactccgaatgatcctcggggccgaaaggagcccttatgccattctcctgtaggatgtttgagaatataagccagtacagctttagggtttcttgtaccttgtatatttggatgataatccatattatcaaaaaaacttgagtcatgtgtgcgaatgcgatgacgagtctgagcaagagcatggagatggggagtcccatctttatgaagctcagaagcacataaaacgccgtaaggcctgagcagattccagaggaataagcccattgtatgaggctcttggctacatcgtggataagtgaggaagacatttttgttctggaaggcaaagttatgtggttgctcagatgcggattcagtgttggtcatagggttccaacacttagccgcaaaaccgaactccggtgttttactctctagaaccctcttacaggcgatacccgaacgacccaggcttgggccaatttatagttggccggggtttctttgccggcccataccgaggccaaaggggatcgccaccgcataatattacagcgatcccctttgggccgaggggacattcgtgcgctctgattgtccccgaggccttcgcaattaagcatctactttaataaagtgatagtgaaattacgcggtattgcgtgttatccacgccctagtggactacataagtgaggtctttgggctttgttgg

SEQ ID NO: 2847 - DNA, 76 bp, Tomato brown rugose fruit virus
  source 1..76: mol_type = other DNA
gtatttttgttttacaacatataccaacaacaacaaacaacaaacaacaacattacaattactatttacaactaca

SEQ ID NO: 2848 - DNA, 13 bp, Celery latent virus
  source 1..13: mol_type = other DNA
aaaatttaaattt

SEQ ID NO: 2849 - DNA, 235 bp, Black grass varicosavirus-like virus
  source 1..235: mol_type = other DNA
cgccaatttcaaccctcccctacttccgattgtgatttttcatcgcatcgagacacccacaggtacagggtcctagtgtctctaacaccaactagaattaatggtattgattttatgtactaaattgtcatctgttctacaggagagacggcagagtttcccaagcacaagcgagatcaaggccacgcataagctcgacaacagagcgtgcaacatcacaagctcataaagctca

SEQ ID NO: 2850 - DNA, 142 bp, Maize suscal virus
  source 1..142: mol_type = other DNA
caggagtgagtttgcgtctcggttaacgttgttgtagccgtttgagagacaacgtatcgattccaacgccatattcttctcatactcatcaatctcacttgtcctctgtccgcccagacaccaacacaatcgaacatttcct

SEQ ID NO: 2851 - DNA, 200 bp, Tomato brown rugose fruit virus
  source 1..200: mol_type = other DNA
gataatcgagatgcttaaataacagattgtgtctgcaaacacacgtggtacgtacgataacgtatagtgtttttccctccacttaaatcgaagggtagtgtcttggagcgcgcgggacaaatgtgtatggttcatacacatccgtaggcacgtaataaagcgagggattcgaattcccccggaacccccggaggggccca

SEQ ID NO: 2852 - DNA, 583 bp, Celery latent virus
  source 1..583: mol_type = other DNA
ttttattatgcaacacaacactctttttgactggggggtgatgtgtctggacttgttacagtctttttctttttcaagtgatgtggaatggaccttgaatcaaataacatttgattttggattcacatcattaatcttcaatagggtggatggccctccccttttggagtcgtacaggacgtatcctgttttatttagtaacatagcaataaacacaaaccaccatgtagatagccgtttcagtggtttggttgtgtgtttttcatttctgtcagaaaacttccaaaaatacaaaaatataaaatttttattttgtcattttggttcgttgggcccaagcgtcttgcatagcatgtcgttcattcctgaaacgagtcccccgatagtttcacaattagtgtaccggacaccttttaaaatcattttcacactttgtgatgaatttgtaaggcgtgtgcgcgtgaaaccgtggtttggacctttggaaagaggctacgctctgtaggtagttttcgatagaaaatggtttcccttaaggaaactgttttgttactttggagttccggcccccaaagtaaatttt

SEQ ID NO: 2853 - DNA, 221 bp, Black grass varicosavirus-like virus
  source 1..221: mol_type = other DNA
taagttgttagtttccgtttgatgaagatggccagcagggtagaagaaaaaactatcaaacttggatacaagcagcagatcttatataaaacatagtatcattcgtaattattgcaccagagatgaatctaaatggcgaccctgtgacctatagcgtcattgataacgcggtcagattgcacgtggaacgcagcacgtatgggtttatgtttgaggcatgt

SEQ ID NO: 2854 - DNA, 303 bp, Maize suscal virus
  source 1..303: mol_type = other DNA
gggcttatcgctcgcagggactaataaaaagtgagtatgtgtaagctgagccaaagactgtatcgccagttttatctaaaagtttattgtgaacttaatttaaagttcctatctgttcccatttaataccattaagaatgtggtcccagctcacctcttgtctagtccaattaagctgcagattgtgttgggtatgacataggacatatgggagtgacaaagttgaggtaataggagaataaaagtggaatcgacagtagtatcggcttgtacaacgttgagcgagacgcaaactcactcctg

SEQ ID NO: 2855 - DNA, 4845 bp, Tomato brown rugose fruit virus
  source 1..4845: mol_type = other DNA
atggcatacacacagacagctaccacatccgctttgctcgacactgtccgaggtaacaataccttggtcaacgatcttgcgaagcggcgtctttatgacacagcggtcgacgagttcaacgctcgtgatcgcaggcccaaagtaaatttttccaaagtaataagtgaggaacagacgcttattgctactagggcatatccagaattccagataaccttctataatacgcagaacgccgtgcattcgcttgccggtggactacgatccttagaactggaatatctaatgatgcagatcccgtacggatcactcacatatgatataggtgggaattttgcatctcatctgttcaaaggacgggcatatgttcactgctgtatgcccaatcttgatgtccgcgacataatgcggcacgaaggccagaaagacagtatagaattatacctttccaggcttgagcggggcaacaaagttgtcccaaatttccaaaaggaagcttttgacagatacgctgaaacgccagacgaagttgtctgtcacagtaccttccaaacgtgtacgcaccagcaggtggaaaacacaggcagggtgtatgctattgcattgcacagtatatacgatatacctgctgatgaattcggagcggcacttttaaggaaaaatgtccatgtttgttacgccgccttccacttttccgagaatttacttctcgaagattcacacgtcaaccttgacgaaatcaacgcgtgtttttcgcgtgatggagacaagctgactttttctttcgcatctgagagcactttaaattattgtcatagttattctaatattttaaaatacgtgtgcaaaacttacttcccggcatctaatagagaggtctacatgaaggagtttttggtcaccagggttaacacctggttttgtaagttttctaggatagatacttttttattatacaagggggtagcccacaaaggtgtaaatagtgagcaattttacagcgcaatggaagatgcatggcactacaaaaagactcttgcaatgtgtaacagcgagaggattcttcttgaagattcctcatcggtcaattactggttcccaaaaatgagagatatggtcatagttcctctattcgacatatctctcgacaccagtaaaaggacccgcaaagaagtcttagtgtcaaaggattttgtattcacagttttaaatcacattcgcacttatcaagccaaggcacttacatactccaatgttttatcctttgtcgaatcaattcgttcaagggtaattatcaacggagtgactgccaggtctgagtgggatgttgacaaatctcttttgcaatccttgtccatgacatttttcttgcatactaagcttgccgttttaaaagacgaattgttaatcagcaagtttagtttggggccaaaatcagtaagccagcatgtatgggatgagatttccctggcttttggaaacgcatttccatcgatcaaggagagactgctaaatcggaaactaattaaagtgtcgggagacgcattagaaatcagggtgcctgatttatatgtgacttttcacgatagattagtgactgagtacaaaacatcggtggatatgccagtgcttgatatcagaaagagaatggaggagactgaggttatgtacaatgcattgtctgagctatctgtgctcaaggagtcggacaagttcgacgttgatgttttttcccggatgtgccagactttggaggtagacccaatgactgcagcaaaggttattgtggcagtgatgagcaacgagagcggactgactcttacattcgaacagccaactgaagcaaatgtcgcattggcacttaaagattcagaaaaagcctctgagggtgcactagtggttacttctagagatgttgaagaaccatccatgaagggttcaatggcaagaggagagttacaattggccggtctgtctggagaccaaccagagtcttcctatactcggaacgaggaaatagagtcattagagcaattccacatggcaacggctagttcgttaattcggaaacagatgagttcgattgtgtacacgggccccattaaagttcagcaaatgaaaaactttattgatagcctggtagcatcactctctgctgcggtgtcgaacctagtcaagatcctaaaggatacagctgctatagatctcgaaacccgtcagaagtttggagtcttagatgttgcgaccaaaagatggttaattaaacctttagccaagaatcacgcatggggcgttattgaaacacatgctaggaagtaccacgttgcacttttggagtatgatgagcatggagtggtaacttgcgacagttggagaagggtggccgtgagttctgagtcaatggtttattctgatatggcaaagctcagaacactgaggagattattaagagatggtgagcctcatgtcagcagtgctaaagtcgtcctagttgacggtgtcccgggttgtggaaagacaaaagagattctctcgaaagtaaattttgaggaagatctaatcttagtaccgggtaagcaggctgctgaaatgataaagaggcgtgctaatgcgtcaggaataattcaagccacaagagataatgttcgtactgttgattcatttataatgaattacggtaaaggaacacgctgtcagttcaaaaggttatttatcgacgaaggtctgatgttgcacactggttgtgtgaattttcttgtttctatgtctctgtgcgaaattgcatatgtttatggagacacacaacaaattccatacatcaacagagtatccggttttccgtaccctgcacattttgcaaaaatagaggttgatgaggtggaaactcgcagaactacgctgcgttgtccagccgacattacccactatcttaacagaaggtacgaaggatatgtcatgtgtacatcgtcggttaaaaagtcagtttctcaggaaatggtgagcggggccgcaatgatcaatcctgtatctaagccattgaatgggaaagttttgactttcactcagtctgataaagaggcgctgctttctcgaggatatacggacgtccatacagtacatgaggtacaaggtgagacatatgcagatgtgtcgttggtcagattgactccgacacctgtatctatcatcgcaggagatagtccgcacgttctcgtagctttgtcaaggcatacccaaacattgaagtattacaccgtagtgatggatcctcttgtaagtataattagggatttagaaaaacttagttcttacttgttagatatgtataaagtagatgcagggacccaacaattacaggtagactccgtgtttaaaggttctaatctttttgttgcagcaccaaagactggagatatctcagatatgcaattttactatgataagtgtctcccaggtaatagcaccatgttaaataactatgatgctgttaccatgaggttgactgacatttctcttaatgtcaaagattgcatattggatttctctaagtctgtggctgcaccgaaggatccgatcaaaccactgattccgatggtacgaacggcggcagaaatgccacgccagactggactattggaaaatttggtggcgatgatcaaaagaaactttaattcaccggagttatcaggaataatcgacattgagaatactgcatctttagtagtagataaattttttgatagttacttgcttaaagaaaaaagaaaaccaaataaaaatgtttctttattttgtagagagtctctcaatagatggttagagaagcaggagcaagtgaccattggtcagcttgcagattttgattttgtggatcttcctgccgttgatcagtacaggcatatgattaaagcgcaacctaagcagaagctggatacatcaattcaaagcgaatatccggccttgcagacgattgtgtatcattcgaaaaagatcaacgcaatcttcggtcctttgttcagtgagctcacaaggcaaatgctcgaaagcatagactcaagtaagtttttgttctttacaaggaagacgccagctcaaattgaggatttcttcggagatctcgatagccatgtccctatggatatcttggagttggatatttcgaagtatgacaaatctcagaacgagttccactgtgcagtagagtatgaaatatggagaagacttggattagaagattttctgggagaagtttggaaacaaggccacaggaaaactactcttaaagattacacagctggtattaaaacgtgtttatggtaccagagaaagagtggggacgttacaacattcatcggtaatacggtgattattgctgcttgtttagcttccatgttgcccatggagaaaataatcaaaggtgcattttgcggagatgacagtttactatacttcccaaaaggttgtgagtttcctgacatacagcatacagccaaccttatgtggaatttcgaggctaagctattcagaaagcagtatggttatttctgtggaaggtacgtgatacatcatgacagagggtgtattgtttattatgaccctttgaagttgatttctaaacttggtgctaaacacatcaaggattgggatcacttagaagagttcagaagatccctttgtgatgttgcaaattcgttgaacaactgtgcgtattacacgcagttggacgacgctgtgagtgaggtccataaaaccgcacccccgggttcgtttgtatataaaagtttagttaaatatctgtccgataaggttctttttagaagtttgtttatagatggctcttgttaa

SEQ ID NO: 2856 - DNA, 10923 bp, Celery latent virus
  source 1..10923: mol_type = other DNA
atgagcaagagaatatatacgattattgttgttttgtgctttcaggtttgctttcaaaatctccgaacacagcctacacaatcttcacataccttctcaacaaatccggcgatccccggtaccgacgctcttcaatttgaagaaaacgcaaacttaacttactctaccataaaatacaatattttaaagtttaatttaaattacaaacaatcaatcatgtctgtggtctctttcgggtcaatcacgagcatggacttcgatgctgcatgtctagcagctatgatcgaaacccctggtggctctattccaccaactccacaatcaccacccacttcaccagtggcggtgaaacaaaggaaaattttaaattttccaattgccaaaatcaggacaactcctgatgcatcttttgagatgtgtgtgaagttccccgagagcttcattgattccttctgtgctcaagcacagaaagaattaaaatattggcacgctgctattacgcagttgaaattctttggtggtgagacaccaaagactcttgaaaccttggtgaaccaaggtcaagctcacactcaccaagttattttaaacttggttaaaatccttgatagtgctccaaaagcaattcaaggaaagaaggagttggaaaatttcttccagctgagcccacatggaaacaattccaaagaaccaattgacgttagtcgaaaggtttatatggaaccgtgcaaaataagtccacgcaagcgacaagtgtgctcctgtgacaatgacgatgatgcacattatcattgttactattgtgatattgtgtgttcaagcaaaaatctattgcaagaacacgaaagggatttttgcgaggatgcacagtcagtgcaagcatttgggtataaacttgagagtccaaatgtctttgacccaccccatgtgacgcagcaaaggagtgttgcaccatctttgggaaaaactttggaatctcctgtgaaatctccagagcagtcaaagccaaacctggagaaaagtttcccactagtggaatcttccaccaacagtggcatgatcttctttggatcaatagctaccatggttccgtctcatattgaaaaatatgtgaggaattgtgaaactgagaatccgattgatgcagctgcatcaaatttggcgatgcaagaagctaaaagctctggcgctccttgtatagtagtgcatcataaggcactaccaggtggaaagaaagattttctttttcctcataactctcctcaagttgtgagaactgaaaccgaagagccaattgctggtaccattgatagaccaacaataaaacgtgctttatttacccgcattaagaagaaagcacaagaaatttgtgtgaacccagggggaaccatccagagaaaaacaaagcgatggttgcggccagcggaagttgcacaaattgtgcgagctacctctgatccacaacatccattgttcaaggtggacgttactcaaattattgaagttgttcatcctgtttataggactgaaagaactgaagttgtgcagcaatgcataacaaggggaacgtacaaattgatgtctaaagcccaacaacggaaggcacgagcaatgcgctcagctggaatgttagtgatcactgataacccaacaacgcattgggtatctgaacctcagaaaatgctagtggtaaaggaaaaactgagcacaacaaagcatgtgaaactccggaatgttgaagtgaatgctgaatctgaaatgttttggggaactaaaacaaaggagggaccctcgaaaacagccttaaagcgctgtaagcgtaacatcgatcgcttggctcttcttgatccgcaaatgggtgagtctgcgaatggtgaatgttggatgaacacctttaagcaccatttaaaagtggggagcattgatattcttccaaataaggttcgtttaccaaaccttaggtcggcattctcacgatggatacctttggttgattatgttgaaattttgaaatttcattgtaagtcacaaccaaagcttaaaagggttgtgatacctactccagttacttatctggaaggttctagatatcacattcatgttggttatagcaagaactgctcatggattacggtcgaacaactaattaggcaattgcagactctgttaacatcatccaaatatggagaacattttaagagagcaattgttggtggtgaaccggaagacaaattcacaccagtggttcctatagttgacgtggaaactgagagagctaaatctagcttggcaaaatggacaactgcgcaacagagatatatgggatctattagaacccgaatcaactcacaagcagaaaaacataaaatcgattcggaaaaaaagatctggataccaatgaggcacgacacgatggatatgttaactccaccatatcttttcgaaaatgggctgagaaacaacgaagttcaacaagtcggccaggttcttggagattctgtagatcgtgctggaaacagttcaggtcagagttctcaatgccaacaacaaaatgtggcgcttgcatccgaaggaaacaacgacaacgtgataaacgagagcgtgcgcagcattcaaaacttagttactgccaatatgcagttgcaagagcaatgcaaattgttgctcgcctcacacgaacaagctatcatggactccgtagaacacggaaacttggagattcagaagcacgatgtagaggtctcgcagaaaccatcaacgaggaaaagcgactcacagaggaatttgcaaaaattctcattgaagaaaatagtcgcctcagaagagatgtcgagaacattgggcagaggatggagaaaatctgtcacctcaatcggtgttccaattgtgagtgcttccattgcagaagctttaaatcaagtcgttcaaaggggaaatacttcctggcttgatgtaggcatttctggaacattgttgaagcaatgtactctttttgctacgagaacttttcaagcgtattgtagctacaaattagcacgaaacgtgctgacattaaccgtgggagaattgtatgataatgtgaaatcatacatcaactctataatgggttccacagatcctgaagtgactggtttcttgtcgcaagtacgtagcgcaccttcaatggtgaagatggccattttgctcacaatgtttgctatctcggtgaaattaatgagaaaattcttcaaggtgaagaataatggaactagctttactgtaagcggagagaatgtctctgcaagccagttgcgaatctcagcacaggctcaagctcgatcaactgacaacatgaccccaactgtaaagaagctttgtagcattcttggaatgattggtttggtttgttgttgttacgatagaacaacatgggcatatcaaaaggattggatggatgcttggatcacaagtatcacatatgccggtgcatctgatagtatttgggaatcaatttcccatccatttgaaacattgcataacattgcagtgagtggaggagatcgttcaccagaaactacagctcgtttggagcgaattttggctggtgcagggttgaacgcacaagcccaagcacttgatgaatttggagcgtctagctcagtgatgggtcagacactgcaaaacatattggatgaggttgaaagtacaaatgtgtcaatcgttagtgaaatgaaagcattgccacactaccaccgaaatgccactaccttcaatcaagcggctcgtgatttagtgactgaaccagatgcaacatatcaaatgttgttaacagcagcaactggtactggaaaatcaacgcttttcccagtgcacctaaggtcacaatctcaaaagagagtcttgctgctcattcctctcgttgcagcaacacatggagtttaccagcgacttaaaagtcaaagggtgaatgatattggttaccatgctgattcaatatctgaaaacccaaatgctaaattaatcatctcaacatatggacacatgtgtgtgaaattacttggtggtcaaaacccttttgatcaatttgattatattttagctgatgaatgtcatgttgtaacactcgagactgttacagtgatatcccatttactccaacagcgagaaatggcgacgtggaaaacagttttcatgacagcaacaccattcaacaatatcacacttaatagtgttgagacagaacagcctgtaatcatgcaacagaccgagcatttccacaaccccaaaagctttgtagattttctaaaagctggcggcactgaaagagtgcaaacatatgctaagggaggctgcatcgtattctgttctacccaaaaagaaactgaggaatcagcgaaagctcttaaagcgagtggggttattgcactcttttaccatgcctctaaccgattggaatgggattcctttgcaaagaaaaatgagcgaagcatgggacaattaaatttttatctctttgctacaaatgcactagaatctggtgtgacgatccctatgaaaagttgcgttgattttgtaactaaaatgcatccagtagttggtggagataggaagactattactatggctccaacttcaattagcattcaagagcaattgcagcgtcgaggtcgagttggacgaacttgtccaggtgggtatctatacacatcagttggaaccccgttgatgtataaacttgacccagattcatccattaagtacttgttgtactgttggaagagtggtatcaaatgttataaggaagcattaaatattcctgatgaatgcacgataacattcactaaagagaaaattggtgctatttggacacatgacacaccgccagttgttacagcagccttagtggataattttggtgcagtttacaggaatgcaaacttcttcttagcatcacatcgaagaaattatgtggaaattccacatacaactgatatgattctgccctcaactctctcgacatgggagaattttgaattggatgggaatgaagtatcagatggcacacgaatgagagtaccacaaaatcatttctttttccgaaacgaaagggtccaagagagttggttgaaattgcaagctgcaattcttactgaactaactgaagcagaagccactaagaagcgagatatagttatcgagaatctgatggcgcgtcgagtatcgggccatcctgcttcgaagcttgaaatagctagaatgataatggccaaacaacaagtggtacaacaagcaagagacacgaaacgtgttcgagaaacccttagtgagagtatatctgattactccggcatcttctcaaacttttctggaatattttcagttcaagaaagattgaaaaaggcttctatcaaggctaatgaggaattagatatggttattcaggaaaatgaatcccatattttatttctacaagacatgataaaagaaactcctgagatcatccctgatatggctttagaggagcagatccaacatatggaatatgcaaaagccatattggaaaatggttggatcagtgggaatcctcaagcaaagcttctcattatgcgcacaacgcataaaaattttcatgatcttgttacaaaaaccaaggatgggacctatcgcatgaaatcatatgtgcaacgcatgttcgattttgtgaagaaacatccattgttaatttttatgtccattatgatgggaacgtcattagcagcaggatacttcatgatgagtaaagactctgaagatgacgatgcaatagtgcaggacaaggttttcaaacgcaatgataaggcaatgctggaatggtgcttgagaggcaaagcatgtaaatgtgacgccacacacttcgaggcacagtatgtacttgattcacgtcattatagaactattctcgaagattgggtaaagttcccattgcgagggttccacaatatacaaatagtaaactatggcacagtgagcaaatatgcacgtgctctagctttcctatcagtttgtgcactcttagctaacccgactatggtgtataatagcgcagcacattccatggctggaaatagtgagtataatgagtcagtagcaaaatccctaatgcacaatattctaagagattggaatagagtcccgctcatagacttattggtaaaagggatagatggaagtgatgatcgttatgatcagtacatacatgaattatatacaagtggaggcctaattgcatttgaatcagacactggaaagtttgaaggaaaaatgtctattagtcaatatcgaaaggatgctgctaaaggacaaacaaaacgtagtgcagcttcacggtcacgtgaagaagatcattatgatccgagatcatcaggtcgactcaagagtgggatcagacgagcatatcgtcaattctataatattgaagattctgatgtgcaggaaattatcctcacaaacaagaaaggagctccaattcttaaaattgggagtcttgatgaattgaaccaacatgttgatcttctaaaattctcagatccagaattgtatgagttgtatttacatgctcgagataaattggatcttgacgaacctgaaagttcaagcggcttcactggaaagtggggtgactatgcggaagatgatgaattcatgaagatgatatcagctttagattcgttaacaaaacaagcttcggaggaagcatttataccagttcaagtgaaacttcgagatgggcgaactgtccaggcaaatgtcgcacgttattggcaaaaagattatccaactggaaaatctgtgaagcaatgggctcaaactacttgggctccaccacaattcacagctcttcgagaaagggtaggaaaagctcttgaactgattcctgaatcgcgaccaattcatcttcatggaaaagtcccaaatggaacacttatagagttccaagatgcaatgaaagatctgcacgagaagacagcagtcaaggctgtagctgaggctaaaatcggagatactcaatttgaggcggatccttctgatgtaacaagccgggttggtgtggttatggtgaaaacatcagcaaacgctgaatgggaatcatggaaccaatgtgttgctttgaataacatagtgatttttccccatcattacacgcttaaagatggtaataatttgagattcaagttttcatcaagtgatttcgaaagcacctgtcacattgtggatgggtacaatgggcttgacatggcttgggctccaattaacgttaaaattcgtggtttgaagaagaaagtttgtttaggcacgccgcggaatggatcttacctatggcatttttccatgattaatcaagggaaagatttgccagaggctcgtcttatgggatactcctctgtaacgaaagtacaagaagagtcgcacccatccttcgattggacacatacagtctcaacgcaagttgggaactgtggtggaccctttgttgataaacatggtgtcattgttggatatcacactggagcttttcaattgggacaatttaatactttcctgggattatcagcaccactaattgcacatctgacaaaattggatgtcaaaccaagtgcccagccccaatcaaagatgatttggagggaagtggatttttatcgatcaccaaattacttacccccaaccattaataaccaagagccaattccagaggagtggagatatccagaaggtaaatctgtttacccatgtgttgatccaggatggatgggttctcgtttggtgaagggatcaggttttcgtctcattggaaaaatgcaacgtcatgtggaatattcaacgaagatttcccttaatgagcattttgacatgtggatgtctcaagagaaaactcaaaatgagttaactaggctgaacaaaaatcgtgtagagaaagggttagagaaagctttcatcagtcacacgatagcagctcagaacaaggaagctgcaattaaagatacgagcaagtatgctagaacaacgttgggaacatattcagaacctttgttgaaaagagcgactgctctgacaatccaaatgctcgaggagcatattaagctatgtaaacgccaaccactggatttagtctatggggatatggaatggaacacagcatgtggagcccagtacaatggattgaaatcagcatttagggatcaagttgttggcatcgagaatatggatgcttatggtcaatactgctgggagcgtttcaacgttccaaccgatcaatacaaaccatgcatttggacaaattcattgaaggatgagttacgaccaattgaaaaagtgaaggagaataaaacgcgcactttcactgcagctccaatcgagtttgtaattggtgctaaacaagctgttgatgcattcaatcatcaattcatggatgcacatttgaagctaccacataccgttggtattaaccaatggtcagggggttggcacaaactatacaagaagttgtatggtaaaaactttgtgtactcaagtggagatggaagccggtttgactcaagtccgtgtttctatatgttcgatgccttgtacacaatacgtacatattttgcagatcctgaaatacaccaggttctggagaatatctacttggaggtttgtcacactccaatagtgttacacgatgggaatgttgtgatgaagaatcatggaaacaatagtggacaatgttctactgttgttgacaatagtctcattatgatgattctatgttgcgcctcttatctagagcacactccagctaccatgcattccctcgatgcaataaaaagccattggcatttttgtgtgaatggagatgattatattggaggaatgtcaccattgttagcaagccatttgactaaagagaagatggcaaaaaccttcagtgacttccagttcatatatgagtggtctgattattcaccatcattatttgaacaagattatatgagtttaaaattcataaacattgttgaacgaaaaggacaaacaactggacaacagttaattgctccatggcgtgaagcatcacgacaactctccactttggctcacacatcaagtggtgcacctgaaatcaaattacaagttgctctaaccgagagggtgaaagcatgggttgataaagatttatttgatttcataacagaatactgcagatggctcgtggagtatttcgatagatttacgaacacgcaagcatggaatgaagctaagaagttatggtgggatgaacaacaaattttcaaccattatttcagttttgaaagcatttgcaatgcgccatactcacaaattgtaaacgaaactcctgatgagttctttgctaatggtgtgagagagtcccgaccattgcgaatcctacgcgatggcatcaaatttggtgttgctgttacagcagctaattatctgggaccaagcgatcacgatgtacccatgattgcaaacacaatgcttaatgttgccaagataggtctcgcaaattcaacagccgagcggattgaccgtatgctatttgggaaggaaaaccctgaacatagtagagcggattcgctagttgttgtaaaaacagagcaaacagatgcgacgatctgtttgcgaactcactgcaaatgccaagcacagcacttcgatgggaaatatgagtgttgggtgagttccccatctgttgctataaaaatgtttgcaacattaaagccccggattctttccacaacgaaatttgttggagttaagtttctaccaaaaatactaagagctcatgtatgggccttatacctatctggattctcttgggaagaaacaatgcaaattgtgcaaagtcactaccctggcgagaaacagcaaagaaaagcggattggttcctacagcaactgctgaaagagctagtattgatattcaaagtgaaagggtcgaagtttattgagttgggagagcatgctcaagttcaagggaaaactcaactcgactctacacaagttgatatggatccaaattttaatgctgcagcttatgctgcaactcttcgaggaggaccgcactggggtacacataattcccaaggtctgtttgatgctattaaggtattaaaccccaatgcagcaaatgttgacattgggaatgcgcgaactgcggttcagcgcgagatgcagcggttgatagctgccgatgctccgcgacaacaaccaccaccacaagttggtggaggacaccaacaaccacctccagctggaggtcaaacgcaaggccagcctggtggttacacaccgagccaggcatttaccaataaatttggtaatataatggctgagcccgatgcccccctcgtgctcgactctcaagcaacaatgagggaagttgcccaaattgaggcagcttgggctcgtcttctagaggtgcaatctctagagggtcttggttccttctggaactacatgttttcctatgtgggaaacaatggcacctcatctggaggtgatcccagggattacatccctgcaggaaatgggcgagttacacttgcccaactaaagtccaaagctcaaggtgagcaatggcgacgttattggcgtagtcatgcgtcagacatgagggatttcttgaggcttcttcaagcttcagatagacctttgcctattcgttgggcaagaaacaatggcattaaagatgccaattacgagattgcattcgattttgcggatgcactcccagatctctcagctgcacaaatgtcaattattttagcagctaagaaccttgccgtaaggcgaggtcaaggccagatgcttaatgctggcaccaaggttggaggtcggtcaagaaccgaaacctatgaccaggctgtccgcgatgctgcggatgtccaattcccaggagcataa

SEQ ID NO: 2857 - DNA, 6096 bp, Black grass varicosavirus-like virus
  source 1..6096: mol_type = other DNA
atggatactctggagcacgctgaagccaatgagctagaagacgatgattactttcttcctgacgaaggacctcttcatgatatgcacttggctagtgcaatcaacttggatcagatacaggagttgatgtatccagggactataaagtacaagatagatattccctattatttaagggatgagtacatgctgatagaaagtttgtgcaaaggagacaagatcaaaatggagcttggaatgttggctccatctttgaaactgtccaagcctggaggagaattgtcaaccatggatttacctgcatataaagaaataggaaaccttgtctgtcaggctttgaggaatagggacatcatgattcctatctccatgaatgatgtggcgctgaagctcccaggagtaatagtctacaggtcatggggtatagcatttgcagaattgttgaagattatatgcacaagagcagaagtgatgaggggagggtctcagcctgtatatcaaggcactggaattgaagcaggtgcagcacattgtcagtttcaagtcaacggcaattggtaccagatcgttgcgaggaagaatctctcaacactatatgacaggcaagagaatgtaatgtatataggaaatatacactcattgcttttgctaatggataccatcggacagaggatttgtttaatggttgccaatcagatagcagaactttatgatacacctggatgggttgatcaaggaaaaattgaccaaatattatcaactggagatgacattctggaagaaatgggaaatgatggatatgaaacaattgctatgtttgaatctcttgttataggaaaggtgttgagagcaactcccgatgacatcacagaatgccataagtttttgtacaactgtatggatgaggtagaaaacatgctactaaactctgctatgagaggaagaatcattgaacttgttcacagatggttggccatatttgacagtttatcgatcaaagagttatcaaatgtcttttgcttatatcgatgttggggacacccggttgtaaatatctatgaagggatggagaaagtttacgacatcggcactgaagagaaagaagttagcccatgggtagcaactgacatattgtgtcagttcagaaaaactttcttgataaattattacgagaagcatcactactatccaaacgtcttgatatcagaagaggtagaaaactcatatgttgctcaatgcattaagaagggttcttcaatagaggagatgtatcctacttatgatactaaggacttcttgggaatcgaaatccagaagatatgggacattccaataacatttgacctttgtcacattcttaatgataaagcagtatctccgaaccagaaggagctaacagacagtgttgtcaggtaccaaaacactacaggaggtcagaacagaagagggctccttagatggttgagaggaaagagcttaaactgcagagagttccttcgggagatagatcagaacgggctccctgaggatgagtgtatcattggaatgtacgagaaagagagagaaatcaagatcaaagccagaatgttttctctgatgtcagaaaggatgagatattacttcgttttgacggaagaccttatagctaagcacgtgctggagctatttcccgcaataacaatgaaagattcacaaaatgtactccaaaagaaattttggaccgttggcggaatgggaaaagactccacattcgacgttaatatcaacatcgatttttcgaagtggaattcgaacatgaggaatgaattaactcaacccatgttccaacagttggataagatcttcggatataccaatttgatatcaaggacccacgagatatttgaatcatcgtttgtatattcatcttcaggcaagtatgttcccactgtaaagtttggaaaactccaagaggatcctcctatggcatatcgtggacataagggaggctttgaagggttgagacaaaaaggatggactgtagctacagtatgtgccttatctgcaattgctgagagaagaaatgtgagaacaaaactgatgggacaaggagacaaccagatagttagaatactgatgcccacccagagatggaaatcaaatgagcttactatcaaagaaatgatccaaaatgccaaacagatccaaaaagcctttgtaaccgatatggagagaacatttgaagaggctaaattgcctatcaaggtgagagagacttgggcttctacgagactatttatgtatggaaagatgatcctacatgacggagatgcgatgccccaatggttcaaaaaagtgctgaggtcatacgctctaaccaatgagggtcaagtcactgtagcaggggtggtaggaactattgctactaacatggcttcagcggcaggattgagtgaaatgcctgatgtcatgtatctcatatttgtagcaatgactgagtggtcgctcggttacttgttagagtaccacccattcacacggaaatgcatcctaagagaacatgagtaccatgtaaagatccccggagcacatagaggaagagattatagggtgaggtcagttaacaagagaagattggtagtttctatgatcctgataccaacggcagctggaggaagtgtaacagttcctctccctggattcattatgaggggattccctgatcacgcctcagaggcttatgcctggatcaagatgcttgcggaagtaaagagtccatacaaaacaatgttaaagaactggtacactttcatcgggaatgattctatccaacctgatatgttgatccagagcccgtcatcaatcaacttcttgaagccgccaacacccagctttcaagggagaatgaacgtaagagagctcttattgtctggagaatttgatcagaaccagttcatcaaagaagcaggaacaatattgggagtctttgacaggaagaaggtctgctctgcgatgttaacagacccaatgaaccctttcataacctcagaggtttattccacttatgcccatgtgtacatagacggagtgataaaaagagtagaaaacaccagtactatcaagaagttggcccaaaaggtgaaaaccaagactcaagtcattaaggcaatgatgtacaatgaacataacttcatcatgttcataagttggagagcaatgaaaagaggtaccatcgactatgattgtgcaacccagcaagctagaatggctaggaatattggttggggaagaacaattactggtgtgaccacacctcatccagtagaattggggattggtcatatatgtaaaggtagacaagatgaatgtcctccaacggattacatttatgtcagaataaatgaaaagggagaatttgtcccttatcttgggtcaagaatcaagtgtaaagtcgtatcagagcaagatatagatgccagaagagagccactgattgctgtgggttcgcgtatatgcaggtactcgtcgtggcttggaattggcccaaatctgatggaaattgttgagaaaaacctagctgttgtctgtgacacatctgtctatgacaaatttatagacgatgatccaaagggactgttgtcatcaggatctattgatcatagattcactccagcaggagcatctgagggagttttcatcaactatgcaccacagattggttgtaatgtgtacatgtcgagcgattgtatgccgacctatggaagaggccagaccaactacactttgcacttccaggctctatattgttggctgcaatacatctcatcaaggagggctgaaagtgtattcatgcatcatcacatagagtgtgaagattgtgtcgtaccaactactgatgaagtccccgacatccagtgcccctttccctatttcgataatatatatcccccaagagtaagggacagcatatcaagagccttgggattcattgataggaaaggaggactagatattatgagcaatgtaagatcattgtgtcatgaagctgaaccaggcatgtttgatgttagacaattgcaaaagggagtgatgtggacactagcaataaagatcggatttcgattgtaccatgggggattattcgggtcagatgataccagagttgaggaccttcaggagtatcccaggatttactcatataaattatacagagataccttactggtcaatgtggcacatgtgatgatgatgcttgcagccatagagatggataaggcacctgatggtgaggaactcgcaaaagtcagaagaagagcaactgataaactgttgtcgaaacccattggaagcttcaaggggttaggaggattaactctaggaaggactgatgagaatccagataacagtcatttgtttatgactggctcattcccagaaactgtattctcaatattgaatacttccaagactgcattaatagagacaattggtcagattggacgcttatccatcgaaggaatgggccatcttcctgtggccaaaggttctctgtccaataagcagtttcgatttctgataatgatgagatgtttgttagaatgcaggaactctcattactttcaacactttcagaagatcccagaggacgaaccaggacatccagcggaccctcaaaatgacgtttatagaatgcttgtcaaaactcccgttctagatatgagtctagacaagatggtcaaatcacttgctgttattaacgaaagaaagactcttccgataatcgaatggaataacatctccttcgaatcaacagaagtgatctgcaggacaggaactcccaggtccatattcatcggaaatagaatgatcgttgagcaaaatagtagaagagagtacagagaagtaactcttccaacatctagcatttacaagtgggctgggatcttgtttcacaaacccttgaaaagacatatcattgtgttgggagatggaacaggaggaacctcactgttggtgaaaacattcaatcaagactctacagtgtacccttgctcctatttagaaacccataagattattccccaagatatggaatgtttaatgcctcaattgtctagaggatatgagggaatctccgggcgagttttgttaaatgttccagatgatatcaaggatcctctctggtcagaaagaatgtctagtgagataaatgacatgggcgttgaaaggacctctatagtctgcgatatagagaccgttgggctatgtgttctccttgatgcattcaggagtttacctcaaggagttcaagtagttatgaaaacctatgccaaagatatattgactaatatcatgtcaataatgggcttgaatcaggtagaggtgggattttctccgcatctgaaccagagcaaccatgaagtgtttctaatgggacacatctcacagaattcttttccagatcctgacatgatgatcaatcaaatggtaaagctttatggtaaggtgagagctgatccaagatccagaatcctggaggaaatgaggatgataaacaaagtattcaagccattaaagaatacgtctgtgtctctatctctagctcatataaataatctgggaattactatgaccagggagatattacaactggatggacttgagatctggggatatgcactgcaatttgtaaatcgtcattatgttgacccatctcatagagcatttcttgctgacaagaaaacgatgaacaggaaaagaaagagagatttgacaagggcattcaggatattgctaggagtggttgtgaatccaggatacctggatataaaacgcaaatggggtattagaactcccaaggaattcaaaccaagaggaatgaaccttatactagccagagattgtgatgatatgggtgtcaaattaaccaagaaggacaaattggcctctgaatgccttcattgcttttggaccaggaagatgaggaaagctcctctagatgcaccagatccaccgggggaagattggatggaaagtgcaacaagagttcgatcatttgccagcagtttatctgagcactcttctcatgattacatcaatgtcattgagacagagtag

SEQ ID NO: 2858 - DNA, 7017 bp, Maize suscal virus
  source 1..7017: mol_type = other DNA
atggagacctttctagatgaacaatttgatgatatgctatctgaatttgagcaagcacggctgtctcggtttccagcctcacatcacagctcggctttaacatattatcctcaacgccatattctgtcattaatgtctccaaactgtcctgtgaaaccaactccccttctgcgggcatactgtgatgcggtcaataaagtatctgatctcttggggggtgggtgtgatgccacagacaacccagctccagtatactcttatatcttctctcagacaacggcttcttcgccagcctattatgacccagactatgaggatccatacctgctggattccctgcgagcagcctcagatgctgtgcttgaagatattgaagctatagaatctcatcatccgggtttttcgctggataaccagaagttgcgactgctgcggaaagtctcttcacgtctccatgcttcctgcaaacagatatttgcggtgcgaagaatgttagaaaaagttagaaatcaaatccagaaatgtcacatcggggttgatcacaagcttatgccagcagtgagattaggaaatttgagtatacacactgttagagatctcatcttcgtagccggactgcaaccattccccatgcgcatccatatactaaattacgatcagtggctaatgatctacgacacagtctgttgccgtgcaatggtaaaggtggcaactttatggaacgaggaattacgcactgacaatatcccttcatgggagatcgtgtcctcagtttataaatggggcgacgcacttttaaccaactatggtgtctcagcgtatgctattataggagaatttgaatcaatagtgactggtgtcttaattacgttttctgacactgacacactaggacttggtgcctcatttgtcaactcaataatggagaacgcgcaagagcaaagcagagcttataatatacctgcgaatgagacattgaagctgatatcattgcttagaactgttgagtctgtgaactggctgtcagagttgttcggtttgagaaagcattggggaaatccaatggtggacgcgcgagcatcgggaaaagcagttcaggagaaggtagatgaggtattgccagttaaagggactgcacttgtgaaattattggcatctttcaacaggatggttacactgtcattcatctctcagcatgggcaatggccggacggttactacctctcgaactcaagagactgcccgctgaaaagagccttcgaatcacggtctacccgtatcccagagactgtggaagggcatcgtcatgaagactgggcatgctttgtgtttctacccaactgcattttagactcatatgaagatgacctggcattaatatcagataaagctgtcagtgtgtaccgcgaacacttagattcagtctatgtgcgggctctctgtaataagcagagtcagggcacggttgaggaagacagaaggttgatgttagagtacttgaggaaacagcatatgccaatactggatattttcaaaatagtaatgacagacgcagtgccgccccgatggatggccaactgtgctagcatgaaaggaacagaaatgaagcacttgaaggcccgaatttttgcggtgcttacatatgagatgagacagtactttgctgcgtcagaagacatactgaagaacaacttatttaagtataacccgcatcagactatgactatgtcagaaacagagctattgactcgactaaaatcattaactactcaattggatccaaacagtcaaagccggcagctgagtgtaatccatattgttgatttttcgaaatggaatttgagaatgagatacactaatacatgcttggtattcaaatctatagacgatttcttaggaactccaggcttgtttgagaattctcatccactcttcagtgatatgctcaacatggtttcagacccattcaatcctccagcgttaggagtagaagagacagaatctgacactatttggagaaatcatcacgcggggtgggagggtcagcgtcagaagggatggacaatcttaacatctgcactcttgtctgacctggagagaacaaccggagttcatagtgaaatatgcggccaaggtgataaccaggcactactaagcaaatttcctgtccccactatctataggaatccggaagaatggatcaagagtgatcctacggaggttaggaaggtgcttgacgacttctatttgagattagaaaaggaatgtgaagctgtaggtctgaagataaaaacagctgagacctgtcgaagtctttgttttttcaactacgggaaaagactctatttcaaaggcagtgaactatccatgaccctaaaacggttctcaaaaaacataacccagcctaatgactcatacccaacaacagaggctattcttaagacatatgagggttcatcttatgcagctggcctttatagccatccaagtctgctgccatactggatgagtaaattctctgtagcccatcaattattcaacagcttcactaacaaccagctttgtgcagaagccccagtacagatgatgtccacctttgggttcccgatcaactaccgactgatcagcacgttgatgaagatcccagcatctctaggtggcccacctcagcagtgtctggctgattatctgctacgcggccatccagatccactatgcactgatttagtcgggttgacattgaagtcaaaggccgggtgtgtgatctctaagaagataattcgtctagctcaatctggtaaatggtttagccaacgcactctgaccagagattccctaatcaaatctccttattctctgaacctcagggtcccattatcagttcgacaaccaattgaagaggctgtgctcccggctgtgcgagctcactgcaacaataacttagtgaaatctctatttgatagctcgatggatgacgacgagagatatattcttgactctttaggtcttatgaagccgttccatccgctcgtggccaacgatatttattcaaggactttaccaggaagaagacagatgtttatatcaggactggcgaataccacgagcttaggtcgcctgattaaagggaattctgcgtttcctctgatctacaaagtcatggatttggagatggagcagctaaaaagctggatagtccagctaacagagcttctcggtttacctgataatgatgatattattcttcctcatcatatattagcgcaacagctgcgcgagaaatcgtggaatacagtcattgagggcataacagttccacatccgttagaacagttcatgcttactctatcaaaatcggacgtctgcaccaacgactgttatacagtagaacctgagcatattgtattggttcaacactccgaggatgtggttgtgtctcccggtgtggaccgtgaccacatcacagcagcgcggtcaaagaaagggagcccctatcttggcagccatatcggagaaggcattgtacagaagcagcttatttgtctaaatccagatacttcctggagagatgtcattagactaaacactatcaagcgttgggtggctccagaggggtctaggctgaggttgtttatgaatggaattataagctcgcggactaacatatctcgtgcctacatagatctcgccacaggcgttccgagtagattgtcttacaaccaccgggccagcctgatggggtcaataaacagctgctctatcagttcgaccacaaacatgcacacaaggttgtacttatcctcgaacagaatgggagattattctcatggtttgaaaaattatcacatgcctttcgggcccacctttctctgttatcagacgctcgtctgcttgatcgggatcttttcacctgagaaatgggcattccctagaaatgtttatcatattcatgtcagagactctagggtgccgccggtgtacgatggcgggttagagctagaagacctaactgtccttgatctgaaaggacacccgcctaccatccttaggtgcttagcctccaaactggtattcgaagcagcaccaggatatgcatcgttcggattttggtgtgagttcgaaacagcatcgaggactgatgcgaaatatgggtatgcccaacagctgacgggtggtttgttcattcaggagacggttgtaagagaatctataacacacgacaggattgggagctttgcatcgagaccggctgtcatatcaattggagacatctcattgatcgagccatctctattccttcgttccatcgcctggggtatgctgttgctcgcacctatgcatctgctgcatttcagaggcaaatatgcattcaaagtttcctgcgtggaatatgtcaatcttttcagccgagctttttggtcttcatttgaatccccaatgagcaacccccgaataattaggaagctcggaaagcatgtcgcgttgatgtctagtcatagtctaggtaggctagattccggcatcatcccagctctgcagataataatcgttgaagagatgtggtgtatcatacattcgatcgccacctatttccgtcgaggaggtgataaaccgaatatcccccccatctttgccccatcgggttctgctgccctactcctcacctcacgagtgatagaaatgatggtcactatacggctagtagttgggaactgcagcatcagtaagatagtagggttcccaagagatttctcggcaaatcttatgagtgtgccgcagccaatatctgccgcagctctgatcgtgatacaacatgacttcttagaattgcagcgtcacttgaaactgccattacgggacatggtgatacccagagtgttctcaacccattacccctgggttgatatcttaaggaagactgacagtgtggaggcagacgatgaagacccgcagaggcaattagtcctcccagtcgactttccgcagtgtgctaatgtagtagaatttcgtatccctgagaaccctgtgttggagactactccacaatgtgactgtaaaacgacacaaagaaagagagatttacatgatgaatgtttcttttcgctgagtgggaactatagcaaatcccacctcaaaattctggagttgatcttttcgttccacctgcctatagcaaatctctgcgtgcttggctctggcactggttctgaagcatgtgcgttaagtaattatctggactgcagacaggtttatgtgaattgctaccacaaactaactgacttctccccgcatgctgcttccacttatgttccgcctgcattcaggtctgatggtatagtgactaagctcgtctctccagcctctgctgtcctaagtctgtcagatctcacggacatcaggactgcggatgctatatatcagcacttaagaggtattgctacaactggtatcatttgcgatgcagagattccaagtgcagcaactcctttactctactcacagataatgcatacaatagtggcagttgtgaggaagaaagcctctatcaactgggtgttaatcaaagtgccgatcttctgtgttcataagcttcttggcctggcagctccactagctcaggccttccatagaatcatctttgcttatccagacttcgggaagcctcattcaagtttggtctatattgtcgctactattcgggctaaggcaactccaattgaagagaataggctgcctactgtaatgcttgaagacgagatgctcagagagatgttggcctctatcagcagtcagaaccattgtagattatatgagatgagggtagcggatagaataagtcggttaagccttaatctaacccttcctcaaagcttgactgtggcttcgaatcggtttgtgcaaggcctgatcctcactgaagacgaaatctccgacccggaacaagttataaaggtactgaaggctgtgaggcaagggttgttgacctcagcacagaaagtagttgaaactcatttccgagttcataatgaaatcacaatgccgaggtcagctgtcctctctgcggatttaggaacccttcacggacagttaaacaacacatacctgaaagtcgctaaatgtgatctgctgttagagctgttgcaccttattcatcctaccctcgaacagatcaagaatcgtgtgtacagctggttggctacagcccactcgtatagaatgagaaacaggaacttcaatgtctacatcaaccagaccagatttatatcacatgattctagatatttattcgaaatccttggacatcttatgaaaagatctgttcccacagttggactccccatccatatggattaccatttattcggatctaggacactgaggcctaagcaacttattgttccttgcccaataggcgtatgtcgaagtccatcaggtagaactagcaaatggaagtggcagaaacgaagtgagatacttggttgggcaatctcattaaccctcacaaatttaccgatagcagttgaggatcataatagcttttcgctggatttcctacacgaaaaaggcatcttagaagatgttcgcatgatggcctcattaaacccatcccgcatagaggtcccttacttctttaggcccaatgagatggccctcgatttgttggcgcatgaccggttgttccttgttgcgccgttgaattctttctcactactcagaagccgttacacaaccgttgagccatactttgttccttggtcgggggcccctttagcttggtgtctattttatctggaggagcggaaccaaattgatagcctgattgtggatgagatctgccttgatgatactctgtcggtcaacacttatgtcgacacagacagcatgtcctgtagatgcctgagctgcaaaacggaagaagtcttgggagagaggttttcgttaaataccaacgatctggatttcctgtgttctcttggatctatagagacagtctatgattctgagcatgctttgtag

SEQ ID NO: 2859 - DNA, 2040 bp, Horseradish latent virus
  source 1..2040: mol_type = genomic DNA
atgaaacctcaacctctgaagacgatggaacatctacttcagaagactcagattcagactgagcaggtgatgaacatcaccaacccaaactcgatttacatccgaggaaggctatacttctcaggatacaagatcgtggagctcgactgtttcgtagatacaggagcaagtctgtgtattgcaagcaaacacgtaataccagaagaaagatgggaagcagctcccagaaagatcaacgtgaagatcgccaatgaaagcacgatcacgctcgataagatatgtcgtaacctcgacatcatcattgccggagaacgattccacattgacgtcgtcttccagcaagaaagcggtatcgacttcatcatcggtaataacttctgtcaggagtactctcctttcatacagttcacaggacacattgtgttcacgatgaaagatcaataccaagtaccaatcacgaagctccgacgagctttcaagagaggaattcctggatttttagaatccatgaagaagagatcaacggctcaacaacctgaaccgctcaacatctctacaaataaaaccgtttcactttcaagggggaggaggtttggagaaaaactcagaatcacccaagaaaggatggtaaaaatcgaagaactacttgaaaaagtttgttctgagaacccattggacccagagaagtccaaaggatggatgcaagccagcatcaaactatcggatcccacgaaggttatcaaggttaaacccatgaaatatagcccaatggaccgagaagaatttgagaagcaaattcaagaattactggacctcaaggtaatcaggcccagtaaaagcccacatatggcaccagcgttcttagtcaacaacgaagctgagaaacgcagaggaaagaagcgtatggtggtcaactacaaagcaatgaatgatgcgactgtaggcgacgcatacaatcttcccaacaaggatgaactccttacgctcatcagaggaaagaaaatcttctcttcctttgactgcaaatcaggattctggcaagttaggcttgacgaagaatcaaaatccttaacggcgtttacatgcccacaaggacactatgagtggaacgtggtccccttcggcatgaagcaggcaccatcgatattccaaagacacatggatgaagcattcaaagtgtttaggaagttctgctgcatatacgttgacgacatcctcgtcttcagcgacaacgagcagaatcatcaacttcatgttgcgatgattctccagaaatgctatcaacatggcatcatactttccaagaagaaagcacagctcttcaaagaaagaatcaacttccttggcctggagatagatcaaggaacgcatagacctcaatcgcatatcttggaacacatccaaaagttcccagatatcattgaaagcaagctacagcttcaacgattcctcggagtactaacatacgcctccgactacatcccgaagctagctcaaatccgaaagcctctgcaagccaagctcaaggaaaacgttcaatggagatggactcctgaggacacattatacatgaagaaggttaaaaagaatctcaacggattccctcctcttcatcatccccttccagaagagaagctgattatcgagaccgatgcatcagacaactactggggaggtattctcaaagctattcatatagatttatctactaacgaatctattgaattagtttgcagatatgcatcaggcagcttcaaacctgctgagcaaaattaccatagcaacgataaagaaacgcttgcggtaataagaactattcaaaagttcagtatttatctgacaccggtaagatttctggtaagaacagataatacgcactttaagtatttccttaatattaattataaaggagattctaaaatgggtagaaatatccgatggcaaggttggttgcaaaactatgtctttgatgttgaccacattaaaggcactaacaattgcctcgcagattttttatcaagggaattcaatggagcttag

SEQ ID NO: 2860 - DNA, 1077 bp, Bean latent virus
  source 1..1077: mol_type = genomic DNA
atgccactcccgaaacgctttcgcttaaatgccaagaactacttcctcacatatcctcagtgttccatatccaaagaagaggcattatcacaattacaacgtctaacaactccagttaacaagaagtttatcaagatatgcagagaaacacatgaagatgggcaacctcatctacacgtgcttatccagttcgaagggaaataccaatgttcaaataacagattcttcgacctggtctccacaaccaggtcagcacatttccatccgaacatacagggagctaaatccagctccgatgtcaagtcctacatcgacaaggatggagatacaattgaatggggagagttccaaatcgacggcagatctgctagaggaggtcagcaatctgctaacgacacatacgcgaaggcattaaatgcaggttctgcagaagcggctctgcagataatcaaggaagaacaacctcaacatttcttccttcaatatcataatctggtctcaaacgcaacaaggatattccaaaaacccccggaaccatgggttcctccatttccacaatcgtcgttcaacaacgttccactggatatgcaacaatgggctgacgattatttcggaaggggtgccgctgcgcggacagagagacctattagtatcatcattgaaggtgattcaagaactggaaaaacaatgtgggcacgttcattaggttctcataattacttgagtggacacctggatttcaattcttttgtctattcaaataatgtagattacaacgtcattgatgacgtcgctccacaatacttaaagatgaagcactggaaagagcttatcggggcccaaaagaattggcaaacaaattgcaagtacggaaagccagttcaaattaaaggtggtatcccatcaattgtgctttgcaatccaggagagggggcgagttataaagactacttggatagacaagagaatgcacatctaaaagcgtggacgcttcataatgcgaaattcatcttcctcaactcccccctctatcaaacctcagcaccggtttgcaaaacgcagggcagtccgacgtag

SEQ ID NO: 2861 - DNA, 1065 bp, Rice latent virus 1
  source 1..1065: mol_type = genomic DNA
atggccgatccctccacttcccaccaattcagcgtacggaccaagtacttcttcctcacctatcctaagtgtcctgttgatccttgggaactccttcactatcttcttactctgctccacagtcgtgtacctatctacatacttgttactcgtgagagtcacaaagatggatcctttcacctacacacccttttacagctatctaaccgcctggagaccaaagactctaggttttttgactatcagtcttatcatcctaactgtcagcctgctcagaactgcaagcaggtcagagactacatcaccaagccgggaaccgtcagtattgcagaatggggcgaattctacaacgccaaaccgttcagcaagaagaccctcaagaggagggcccctggatctgacaccaaggacaccaagatgaggaaaatcatctcctcgtccacctcgaaaacagagtacctctctatggtacgccagacattccccttcgactgggcaactaggctggcccagttcgagtacagcgcagagaagctcttccccaccaccgtaactccatacgcaagctctgtccccactgatcagctacgttgcagcgaacagctgagtcagtgggccacagagaacataaagacatacacggtatgtgaagaagatgctccaacaaccgccagaagatatacctccctatatgtatgcggaccaacccgaacaggaaagacaacctgggcaagaagcctcgggaagcacaactattggaacggactggtggacttcaccacttatgaccccaccgcacaatacaatgttatagacgacatcccgttcaagtactgccctaattggaagcagctaatcggatgtcaccgtgactacaccgtcaatcctaagtacggcaagcggaaggtaataagtggtgggatcccctccatcgtcctggtaaatgaagacgaagactggctgagtcaatgtacaccggctcagaccaagtacatcgaaagcaactgcgtgatacattacatgtatgaaggggatagtttcttcaagcacccttcgggtgcttag

SEQ ID NO: 2862 - DNA, 1149 bp, Rice latent virus 2
  source 1..1149: mol_type = genomic DNA
atgaccaacactgaatccgcatctgagcaaccacataactttgccttccagaacaaaaatgtcttcctcacttatccacgatgtagccaagagcctcatacaatgggcttattcctctggaatctgctcaggccttacggcgttttatgtgcttctgagcttcataaagatgggactccccatctccatgctcttgctcagactcgtcatcgcattcgcacacatgactcaagtttttttgataatatggattatcatccaaatatacaaggtacaagaaaccctaaagctgtactggcttatattctcaaacatcctacaggagaatggcataagggctcctttcggccccgaggatcattcggagttcctccgactgggaatggagaggctggaccttctacgacgattaggagagctgctggggattcctccagctcggccgagggaggtaacacctcctccgagctggccaacaagcgacgaagaatgactaaagaccagataatggctgacatcctacgctcggcgacctcaaggatggagtacatgaacggggtcaagaagtggtttccgtacgactactgcgccaggctgcaagcctgggagtatgcttctcagaagctatttcctgatccaccggtaacatatgaaccaccgttcaatgactccatgtttcattgccatgaaacactcacagaatgggctgccgagaacatctaccatgtaaccccgcaggcgagaccaatcagcctctacatctgcggaccatcaaggacaggaaagtctacttgggctagaagcctcggcagacacaattactaccagaataacgtagacttcgggatgtatgatcccgaagctctatataatataatagatgatatacccttcaagttctgtccttgctggaaggccctcgtcggagctcagaaggattacaccgttaatccgaaatacgggaaaaagaagctcatcaaaggaggaatcccttcaattgtcatcgttaacgatgacgacgactggcctaaagcaatgactgctgaacagctctcgtacttcgagagcaactgcatcatatttaatatgagtctatataatttcagctttatatcagacaccggcgcaacagcgccggaaagatgttaa

SEQ ID NO: 2863 - protein, 1615 aa, Tomato brown rugose fruit virus
MAYTQTATTSALLDTVRGNNTLVNDLAKRRLYDTAVDEFNARDRRPKVNFSKVISEEQTLIATRAYPEFQITFYNTQNAVHSLAGGLRSLELEYLMMQIPYGSLTYDIGGNFASHLFKGRAYVHCCMPNLDVRDIMRHEGQKDSIELYLSRLERGNKVVPNFQKEAFDRYAETPDEVVCHSTFQTCTHQQVENTGRVYAIALHSIYDIPADEFGAALLRKNVHVCYAAFHFSENLLLEDSHVNLDEINACFSRDGDKLTFSFASESTLNYCHSYSNILKYVCKTYFPASNREVYMKEFLVTRVNTWFCKFSRIDTFLLYKGVAHKGVNSEQFYSAMEDAWHYKKTLAMCNSERILLEDSSSVNYWFPKMRDMVIVPLFDISLDTSKRTRKEVLVSKDFVFTVLNHIRTYQAKALTYSNVLSFVESIRSRVIINGVTARSEWDVDKSLLQSLSMTFFLHTKLAVLKDELLISKFSLGPKSVSQHVWDEISLAFGNAFPSIKERLLNRKLIKVSGDALEIRVPDLYVTFHDRLVTEYKTSVDMPVLDIRKRMEETEVMYNALSELSVLKESDKFDVDVFSRMCQTLEVDPMTAAKVIVAVMSNESGLTLTFEQPTEANVALALKDSEKASEGALVVTSRDVEEPSMKGSMARGELQLAGLSGDQPESSYTRNEEIESLEQFHMATASSLIRKQMSSIVYTGPIKVQQMKNFIDSLVASLSAAVSNLVKILKDTAAIDLETRQKFGVLDVATKRWLIKPLAKNHAWGVIETHARKYHVALLEYDEHGVVTCDSWRRVAVSSESMVYSDMAKLRTLRRLLRDGEPHVSSAKVVLVDGVPGCGKTKEILSKVNFEEDLILVPGKQAAEMIKRRANASGIIQATRDNVRTVDSFIMNYGKGTRCQFKRLFIDEGLMLHTGCVNFLVSMSLCEIAYVYGDTQQIPYINRVSGFPYPAHFAKIEVDEVETRRTTLRCPADITHYLNRRYEGYVMCTSSVKKSVSQEMVSGAAMINPVSKPLNGKVLTFTQSDKEALLSRGYTDVHTVHEVQGETYADVSLVRLTPTPVSIIAGDSPHVLVALSRHTQTLKYYTVVMDPLVSIIRDLEKLSSYLLDMYKVDAGTQXQLQVDSVFKGSNLFVAAPKTGDISDMQFYYDKCLPGNSTMLNNYDAVTMRLTDISLNVKDCILDFSKSVAAPKDPIKPLIPMVRTAAEMPRQTGLLENLVAMIKRNFNSPELSGIIDIENTASLVVDKFFDSYLLKEKRKPNKNVSLFCRESLNRWLEKQEQVTIGQLADFDFVDLPAVDQYRHMIKAQPKQKLDTSIQSEYPALQTIVYHSKKINAIFGPLFSELTRQMLESIDSSKFLFFTRKTPAQIEDFFGDLDSHVPMDILELDISKYDKSQNEFHCAVEYEIWRRLGLEDFLGEVWKQGHRKTTLKDYTAGIKTCLWYQRKSGDVTTFIGNTVIIAACLASMLPMEKIIKGAFCGDDSLLYFPKGCEFPDIQHTANLMWNFEAKLFRKQYGYFCGRYVIHHDRGCIVYYDPLKLISKLGAKHIKDWDHLEEFRRSLCDVANSLNNCAYYTQLDDAVSEVHKTAPPGSFVYKSLVKYLSDKVLFRSLFIDGSC

SEQ ID NO: 2864 - protein, 3640 aa, Celery latent virus
MSKRIYTIIVVLCFQVCFQNLRTQPTQSSHTFSTNPAIPGTDALQFEENANLTYSTIKYNILKFNLNYKQSIMSVVSFGSITSMDFDAACLAAMIETPGGSIPPTPQSPPTSPVAVKQRKILNFPIAKIRTTPDASFEMCVKFPESFIDSFCAQAQKELKYWHAAITQLKFFGGETPKTLETLVNQGQAHTHQVILNLVKILDSAPKAIQGKKELENFFQLSPHGNNSKEPIDVSRKVYMEPCKISPRKRQVCSCDNDDDAHYHCYYCDIVCSSKNLLQEHERDFCEDAQSVQAFGYKLESPNVFDPPHVTQQRSVAPSLGKTLESPVKSPEQSKPNLEKSFPLVESSTNSGMIFFGSIATMVPSHIEKYVRNCETENPIDAAASNLAMQEAKSSGAPCIVVHHKALPGGKKDFLFPHNSPQVVRTETEEPIAGTIDRPTIKRALFTRIKKKAQEICVNPGGTIQRKTKRWLRPAEVAQIVRATSDPQHPLFKVDVTQIIEVVHPVYRTERTEVVQQCITRGTYKLMSKAQQRKARAMRSAGMLVITDNPTTHWVSEPQKMLVVKEKLSTTKHVKLRNVEVNAESEMFWGTKTKEGPSKTALKRCKRNIDRLALLDPQMGESANGECWMNTFKHHLKVGSIDILPNKVRLPNLRSAFSRWIPLVDYVEILKFHCKSQPKLKRVVIPTPVTYLEGSRYHIHVGYSKNCSWITVEQLIRQLQTLLTSSKYGEHFKRAIVGGEPEDKFTPVVPIVDVETERAKSSLAKWTTAQQRYMGSIRTRINSQAEKHKIDSEKKIWIPMRHDTMDMLTPPYLFENGLRNNEVQQVGQVLGDSVDRAGNSSGQSSQCQQQNVALASEGNNDNVINESVRSIQNLVTANMQLQEQCKLLLASHEQAIMDSVEHGNLEIQKHDVEVSQKPSTRKSDSQRNLQKFSLKKIVASEEMSRTLGRGWRKSVTSIGVPIVSASIAEALNQVVQRGNTSWLDVGISGTLLKQCTLFATRTFQAYCSYKLARNVLTLTVGELYDNVKSYINSIMGSTDPEVTGFLSQVRSAPSMVKMAILLTMFAISVKLMRKFFKVKNNGTSFTVSGENVSASQLRISAQAQARSTDNMTPTVKKLCSILGMIGLVCCCYDRTTWAYQKDWMDAWITSITYAGASDSIWESISHPFETLHNIAVSGGDRSPETTARLERILAGAGLNAQAQALDEFGASSSVMGQTLQNILDEVESTNVSIVSEMKALPHYHRNATTFNQAARDLVTEPDATYQMLLTAATGTGKSTLFPVHLRSQSQKRVLLLIPLVAATHGVYQRLKSQRVNDIGYHADSISENPNAKLIISTYGHMCVKLLGGQNPFDQFDYILADECHVVTLETVTVISHLLQQREMATWKTVFMTATPFNNITLNSVETEQPVIMQQTEHFHNPKSFVDFLKAGGTERVQTYAKGGCIVFCSTQKETEESAKALKASGVIALFYHASNRLEWDSFAKKNERSMGQLNFYLFATNALESGVTIPMKSCVDFVTKMHPVVGGDRKTITMAPTSISIQEQLQRRGRVGRTCPGGYLYTSVGTPLMYKLDPDSSIKYLLYCWKSGIKCYKEALNIPDECTITFTKEKIGAIWTHDTPPVVTAALVDNFGAVYRNANFFLASHRRNYVEIPHTTDMILPSTLSTWENFELDGNEVSDGTRMRVPQNHFFFRNERVQESWLKLQAAILTELTEAEATKKRDIVIENLMARRVSGHPASKLEIARMIMAKQQVVQQARDTKRVRETLSESISDYSGIFSNFSGIFSVQERLKKASIKANEELDMVIQENESHILFLQDMIKETPEIIPDMALEEQIQHMEYAKAILENGWISGNPQAKLLIMRTTHKNFHDLVTKTKDGTYRMKSYVQRMFDFVKKHPLLIFMSIMMGTSLAAGYFMMSKDSEDDDAIVQDKVFKRNDKAMLEWCLRGKACKCDATHFEAQYVLDSRHYRTILEDWVKFPLRGFHNIQIVNYGTVSKYARALAFLSVCALLANPTMVYNSAAHSMAGNSEYNESVAKSLMHNILRDWNRVPLIDLLVKGIDGSDDRYDQYIHELYTSGGLIAFESDTGKFEGKMSISQYRKDAAKGQTKRSAASRSREEDHYDPRSSGRLKSGIRRAYRQFYNIEDSDVQEIILTNKKGAPILKIGSLDELNQHVDLLKFSDPELYELYLHARDKLDLDEPESSSGFTGKWGDYAEDDEFMKMISALDSLTKQASEEAFIPVQVKLRDGRTVQANVARYWQKDYPTGKSVKQWAQTTWAPPQFTALRERVGKALELIPESRPIHLHGKVPNGTLIEFQDAMKDLHEKTAVKAVAEAKIGDTQFEADPSDVTSRVGVVMVKTSANAEWESWNQCVALNNIVIFPHHYTLKDGNNLRFKFSSSDFESTCHIVDGYNGLDMAWAPINVKIRGLKKKVCLGTPRNGSYLWHFSMINQGKDLPEARLMGYSSVTKVQEESHPSFDWTHTVSTQVGNCGGPFVDKHGVIVGYHTGAFQLGQFNTFLGLSAPLIAHLTKLDVKPSAQPQSKMIWREVDFYRSPNYLPPTINNQEPIPEEWRYPEGKSVYPCVDPGWMGSRLVKGSGFRLIGKMQRHVEYSTKISLNEHFDMWMSQEKTQNELTRLNKNRVEKGLEKAFISHTIAAQNKEAAIKDTSKYARTTLGTYSEPLLKRATALTIQMLEEHIKLCKRQPLDLVYGDMEWNTACGAQYNGLKSAFRDQVVGIENMDAYGQYCWERFNVPTDQYKPCIWTNSLKDELRPIEKVKENKTRTFTAAPIEFVIGAKQAVDAFNHQFMDAHLKLPHTVGINQWSGGWHKLYKKLYGKNFVYSSGDGSRFDSSPCFYMFDALYTIRTYFADPEIHQVLENIYLEVCHTPIVLHDGNVVMKNHGNNSGQCSTVVDNSLIMMILCCASYLEHTPATMHSLDAIKSHWHFCVNGDDYIGGMSPLLASHLTKEKMAKTFSDFQFIYEWSDYSPSLFEQDYMSLKFINIVERKGQTTGQQLIAPWREASRQLSTLAHTSSGAPEIKLQVALTERVKAWVDKDLFDFITEYCRWLVEYFDRFTNTQAWNEAKKLWWDEQQIFNHYFSFESICNAPYSQIVNETPDEFFANGVRESRPLRILRDGIKFGVAVTAANYLGPSDHDVPMIANTMLNVAKIGLANSTAERIDRMLFGKENPEHSRADSLVVVKTEQTDATICLRTHCKCQAQHFDGKYECWVSSPSVAIKMFATLKPRILSTTKFVGVKFLPKILRAHVWALYLSGFSWEETMQIVQSHYPGEKQQRKADWFLQQLLKELVLIFKVKGSKFIELGEHAQVQGKTQLDSTQVDMDPNFNAAAYAATLRGGPHWGTHNSQGLFDAIKVLNPNAANVDIGNARTAVQREMQRLIAADAPRQQPPPQVGGGHQQPPPAGGQTQGQPGGYTPSQAFTNKFGNIMAEPDAPLVLDSQATMREVAQIEAAWARLLEVQSLEGLGSFWNYMFSYVGNNGTSSGGDPRDYIPAGNGRVTLAQLKSKAQGEQWRRYWRSHASDMRDFLRLLQASDRPLPIRWARNNGIKDANYEIAFDFADALPDLSAAQMSIILAAKNLAVRRGQGQMLNAGTKVGGRSRTETYDQAVRDAADVQFPGA

SEQ ID NO: 2865 - protein, 2031 aa, Black grass varicosavirus-like virus
MDTLEHAEANELEDDDYFLPDEGPLHDMHLASAINLDQIQELMYPGTIKYKIDIPYYLRDEYMLIESLCKGDKIKMELGMLAPSLKLSKPGGELSTMDLPAYKEIGNLVCQALRNRDIMIPISMNDVALKLPGVIVYRSWGIAFAELLKIICTRAEVMRGGSQPVYQGTGIEAGAAHCQFQVNGNWYQIVARKNLSTLYDRQENVMYIGNIHSLLLLMDTIGQRICLMVANQIAELYDTPGWVDQGKIDQILSTGDDILEEMGNDGYETIAMFESLVIGKVLRATPDDITECHKFLYNCMDEVENMLLNSAMRGRIIELVHRWLAIFDSLSIKELSNVFCLYRCWGHPVVNIYEGMEKVYDIGTEEKEVSPWVATDILCQFRKTFLINYYEKHHYYPNVLISEEVENSYVAQCIKKGSSIEEMYPTYDTKDFLGIEIQKIWDIPITFDLCHILNDKAVSPNQKELTDSVVRYQNTTGGQNRRGLLRWLRGKSLNCREFLREIDQNGLPEDECIIGMYEKEREIKIKARMFSLMSERMRYYFVLTEDLIAKHVLELFPAITMKDSQNVLQKKFWTVGGMGKDSTFDVNINIDFSKWNSNMRNELTQPMFQQLDKIFGYTNLISRTHEIFESSFVYSSSGKYVPTVKFGKLQEDPPMAYRGHKGGFEGLRQKGWTVATVCALSAIAERRNVRTKLMGQGDNQIVRILMPTQRWKSNELTIKEMIQNAKQIQKAFVTDMERTFEEAKLPIKVRETWASTRLFMYGKMILHDGDAMPQWFKKVLRSYALTNEGQVTVAGVVGTIATNMASAAGLSEMPDVMYLIFVAMTEWSLGYLLEYHPFTRKCILREHEYHVKIPGAHRGRDYRVRSVNKRRLVVSMILIPTAAGGSVTVPLPGFIMRGFPDHASEAYAWIKMLAEVKSPYKTMLKNWYTFIGNDSIQPDMLIQSPSSINFLKPPTPSFQGRMNVRELLLSGEFDQNQFIKEAGTILGVFDRKKVCSAMLTDPMNPFITSEVYSTYAHVYIDGVIKRVENTSTIKKLAQKVKTKTQVIKAMMYNEHNFIMFISWRAMKRGTIDYDCATQQARMARNIGWGRTITGVTTPHPVELGIGHICKGRQDECPPTDYIYVRINEKGEFVPYLGSRIKCKVVSEQDIDARREPLIAVGSRICRYSSWLGIGPNLMEIVEKNLAVVCDTSVYDKFIDDDPKGLLSSGSIDHRFTPAGASEGVFINYAPQIGCNVYMSSDCMPTYGRGQTNYTLHFQALYCWLQYISSRRAESVFMHHHIECEDCVVPTTDEVPDIQCPFPYFDNIYPPRVRDSISRALGFIDRKGGLDIMSNVRSLCHEAEPGMFDVRQLQKGVMWTLAIKIGFRLYHGGLFGSDDTRVEDLQEYPRIYSYKLYRDTLLVNVAHVMMMLAAIEMDKAPDGEELAKVRRRATDKLLSKPIGSFKGLGGLTLGRTDENPDNSHLFMTGSFPETVFSILNTSKTALIETIGQIGRLSIEGMGHLPVAKGSLSNKQFRFLIMMRCLLECRNSHYFQHFQKIPEDEPGHPADPQNDVYRMLVKTPVLDMSLDKMVKSLAVINERKTLPIIEWNNISFESTEVICRTGTPRSIFIGNRMIVEQNSRREYREVTLPTSSIYKWAGILFHKPLKRHIIVLGDGTGGTSLLVKTFNQDSTVYPCSYLETHKIIPQDMECLMPQLSRGYEGISGRVLLNVPDDIKDPLWSERMSSEINDMGVERTSIVCDIETVGLCVLLDAFRSLPQGVQVVMKTYAKDILTNIMSIMGLNQVEVGFSPHLNQSNHEVFLMGHISQNSFPDPDMMINQMVKLYGKVRADPRSRILEEMRMINKVFKPLKNTSVSLSLAHINNLGITMTREILQLDGLEIWGYALQFVNRHYVDPSHRAFLADKKTMNRKRKRDLTRAFRILLGVVVNPGYLDIKRKWGIRTPKEFKPRGMNLILARDCDDMGVKLTKKDKLASECLHCFWTRKMRKAPLDAPDPPGEDWMESATRVRSFASSLSEHSSHDYINVIETE

SEQ ID NO: 2866 - protein, 2338 aa, Maize suscal virus
METFLDEQFDDMLSEFEQARLSRFPASHHSSALTYYPQRHILSLMSPNCPVKPTPLLRAYCDAVNKVSDLLGGGCDATDNPAPVYSYIFSQTTASSPAYYDPDYEDPYLLDSLRAASDAVLEDIEAIESHHPGFSLDNQKLRLLRKVSSRLHASCKQIFAVRRMLEKVRNQIQKCHIGVDHKLMPAVRLGNLSIHTVRDLIFVAGLQPFPMRIHILNYDQWLMIYDTVCCRAMVKVATLWNEELRTDNIPSWEIVSSVYKWGDALLTNYGVSAYAIIGEFESIVTGVLITFSDTDTLGLGASFVNSIMENAQEQSRAYNIPANETLKLISLLRTVESVNWLSELFGLRKHWGNPMVDARASGKAVQEKVDEVLPVKGTALVKLLASFNRMVTLSFISQHGQWPDGYYLSNSRDCPLKRAFESRSTRIPETVEGHRHEDWACFVFLPNCILDSYEDDLALISDKAVSVYREHLDSVYVRALCNKQSQGTVEEDRRLMLEYLRKQHMPILDIFKIVMTDAVPPRWMANCASMKGTEMKHLKARIFAVLTYEMRQYFAASEDILKNNLFKYNPHQTMTMSETELLTRLKSLTTQLDPNSQSRQLSVIHIVDFSKWNLRMRYTNTCLVFKSIDDFLGTPGLFENSHPLFSDMLNMVSDPFNPPALGVEETESDTIWRNHHAGWEGQRQKGWTILTSALLSDLERTTGVHSEICGQGDNQALLSKFPVPTIYRNPEEWIKSDPTEVRKVLDDFYLRLEKECEAVGLKIKTAETCRSLCFFNYGKRLYFKGSELSMTLKRFSKNITQPNDSYPTTEAILKTYEGSSYAAGLYSHPSLLPYWMSKFSVAHQLFNSFTNNQLCAEAPVQMMSTFGFPINYRLISTLMKIPASLGGPPQQCLADYLLRGHPDPLCTDLVGLTLKSKAGCVISKKIIRLAQSGKWFSQRTLTRDSLIKSPYSLNLRVPLSVRQPIEEAVLPAVRAHCNNNLVKSLFDSSMDDDERYILDSLGLMKPFHPLVANDIYSRTLPGRRQMFISGLANTTSLGRLIKGNSAFPLIYKVMDLEMEQLKSWIVQLTELLGLPDNDDIILPHHILAQQLREKSWNTVIEGITVPHPLEQFMLTLSKSDVCTNDCYTVEPEHIVLVQHSEDVVVSPGVDRDHITAARSKKGSPYLGSHIGEGIVQKQLICLNPDTSWRDVIRLNTIKRWVAPEGSRLRLFMNGIISSRTNISRAYIDLATGVPSRLSYNHRASLMGSINSCSISSTTNMHTRLYLSSNRMGDYSHGLKNYHMPFGPTFLCYQTLVCLIGIFSPEKWAFPRNVYHIHVRDSRVPPVYDGGLELEDLTVLDLKGHPPTILRCLASKLVFEAAPGYASFGFWCEFETASRTDAKYGYAQQLTGGLFIQETVVRESITHDRIGSFASRPAVISIGDISLIEPSLFLRSIAWGMLLLAPMHLLHFRGKYAFKVSCVEYVNLFSRAFWSSFESPMSNPRIIRKLGKHVALMSSHSLGRLDSGIIPALQIIIVEEMWCIIHSIATYFRRGGDKPNIPPIFAPSGSAALLLTSRVIEMMVTIRLVVGNCSISKIVGFPRDFSANLMSVPQPISAAALIVIQHDFLELQRHLKLPLRDMVIPRVFSTHYPWVDILRKTDSVEADDEDPQRQLVLPVDFPQCANVVEFRIPENPVLETTPQCDCKTTQRKRDLHDECFFSLSGNYSKSHLKILELIFSFHLPIANLCVLGSGTGSEACALSNYLDCRQVYVNCYHKLTDFSPHAASTYVPPAFRSDGIVTKLVSPASAVLSLSDLTDIRTADAIYQHLRGIATTGIICDAEIPSAATPLLYSQIMHTIVAVVRKKASINWVLIKVPIFCVHKLLGLAAPLAQAFHRIIFAYPDFGKPHSSLVYIVATIRAKATPIEENRLPTVMLEDEMLREMLASISSQNHCRLYEMRVADRISRLSLNLTLPQSLTVASNRFVQGLILTEDEISDPEQVIKVLKAVRQGLLTSAQKVVETHFRVHNEITMPRSAVLSADLGTLHGQLNNTYLKVAKCDLLLELLHLIHPTLEQIKNRVYSWLATAHSYRMRNRNFNVYINQTRFISHDSRYLFEILGHLMKRSVPTVGLPIHMDYHLFGSRTLRPKQLIVPCPIGVCRSPSGRTSKWKWQKRSEILGWAISLTLTNLPIAVEDHNSFSLDFLHEKGILEDVRMMASLNPSRIEVPYFFRPNEMALDLLAHDRLFLVAPLNSFSLLRSRYTTVEPYFVPWSGAPLAWCLFYLEERNQIDSLIVDEICLDDTLSVNTYVDTDSMSCRCLSCKTEEVLGERFSLNTNDLDFLCSLGSIETVYDSEHAL

SEQ ID NO: 2867 - protein, 679 aa, Horseradish latent virus
MKPQPLKTMEHLLQKTQIQTEQVMNITNPNSIYIRGRLYFSGYKIVELDCFVDTGASLCIASKHVIPEERWEAAPRKINVKIANESTITLDKICRNLDIIIAGERFHIDVVFQQESGIDFIIGNNFCQEYSPFIQFTGHIVFTMKDQYQVPITKLRRAFKRGIPGFLESMKKRSTAQQPEPLNISTNKTVSLSRGRRFGEKLRITQERMVKIEELLEKVCSENPLDPEKSKGWMQASIKLSDPTKVIKVKPMKYSPMDREEFEKQIQELLDLKVIRPSKSPHMAPAFLVNNEAEKRRGKKRMVVNYKAMNDATVGDAYNLPNKDELLTLIRGKKIFSSFDCKSGFWQVRLDEESKSLTAFTCPQGHYEWNVVPFGMKQAPSIFQRHMDEAFKVFRKFCCIYVDDILVFSDNEQNHQLHVAMILQKCYQHGIILSKKKAQLFKERINFLGLEIDQGTHRPQSHILEHIQKFPDIIESKLQLQRFLGVLTYASDYIPKLAQIRKPLQAKLKENVQWRWTPEDTLYMKKVKKNLNGFPPLHHPLPEEKLIIETDASDNYWGGILKAIHIDLSTNESIELVCRYASGSFKPAEQNYHSNDKETLAVIRTIQKFSIYLTPVRFLVRTDNTHFKYFLNINYKGDSKMGRNIRWQGWLQNYVFDVDHIKGTNNCLADFLSREFNGA

SEQ ID NO: 2868 - protein, 358 aa, Bean latent virus
MPLPKRFRLNAKNYFLTYPQCSISKEEALSQLQRLTTPVNKKFIKICRETHEDGQPHLHVLIQFEGKYQCSNNRFFDLVSTTRSAHFHPNIQGAKSSSDVKSYIDKDGDTIEWGEFQIDGRSARGGQQSANDTYAKALNAGSAEAALQIIKEEQPQHFFLQYHNLVSNATRIFQKPPEPWVPPFPQSSFNNVPLDMQQWADDYFGRGAAARTERPISIIIEGDSRTGKTMWARSLGSHNYLSGHLDFNSFVYSNNVDYNVIDDVAPQYLKMKHWKELIGAQKNWQTNCKYGKPVQIKGGIPSIVLCNPGEGASYKDYLDRQENAHLKAWTLHNAKFIFLNSPLYQTSAPVCKTQGSPT

SEQ ID NO: 2869 - protein, 354 aa, Rice latent virus 1
MADPSTSHQFSVRTKYFFLTYPKCPVDPWELLHYLLTLLHSRVPIYILVTRESHKDGSFHLHTLLQLSNRLETKDSRFFDYQSYHPNCQPAQNCKQVRDYITKPGTVSIAEWGEFYNAKPFSKKTLKRRAPGSDTKDTKMRKIISSSTSKTEYLSMVRQTFPFDWATRLAQFEYSAEKLFPTTVTPYASSVPTDQLRCSEQLSQWATENIKTYTVCEEDAPTTARRYTSLYVCGPTRTGKTTWARSLGKHNYWNGLVDFTTYDPTAQYNVIDDIPFKYCPNWKQLIGCHRDYTVNPKYGKRKVISGGIPSIVLVNEDEDWLSQCTPAQTKYIESNCVIHYMYEGDSFFKHPSGA

SEQ ID NO: 2870 - protein, 382 aa, Rice latent virus 2
MTNTESASEQPHNFAFQNKNVFLTYPRCSQEPHTMGLFLWNLLRPYGVLCASELHKDGTPHLHALAQTRHRIRTHDSSFFDNMDYHPNIQGTRNPKAVLAYILKHPTGEWHKGSFRPRGSFGVPPTGNGEAGPSTTIRRAAGDSSSSAEGGNTSSELANKRRRMTKDQIMADILRSATSRMEYMNGVKKWFPYDYCARLQAWEYASQKLFPDPPVTYEPPFNDSMFHCHETLTEWAAENIYHVTPQARPISLYICGPSRTGKSTWARSLGRHNYYQNNVDFGMYDPEALYNIIDDIPFKFCPCWKALVGAQKDYTVNPKYGKKKLIKGGIPSIVIVNDDDDWPKAMTAEQLSYFESNCIIFNMSLYNFSFISDTGATAPERC

SEQ ID NO: 2871 - DNA, 38 bp, synthetic construct
  source 1..38: mol_type = other DNA
ccactggattcagcgaagttatgcgtaaaggcgaagag

SEQ ID NO: 2872 - DNA, 20 bp, synthetic construct
  source 1..20: mol_type = other DNA
ctgagtccagctacgagcag

SEQ ID NO: 2873 - DNA, 19 bp, synthetic construct
  source 1..19: mol_type = other DNA
ccactggattcagcgaagt

SEQ ID NO: 2874 - DNA, 21 bp, synthetic construct
  source 1..21: mol_type = other DNA
aacttcagcgtcagtttacca

SEQ ID NO: 2875 - DNA, 23 bp, synthetic construct
  source 1..23: mol_type = other DNA
  misc_feature 1: note = 5' 6-FAM 520 fluorophore
  misc_feature 10: note = internal ZEN quencher
  misc_feature 23: note = 3' Iowa Black FQ quencher
cgagggtgaaggtgacgcaacta

SEQ ID NO: 2876 - DNA, 20 bp, synthetic construct
  source 1..20: mol_type = other DNA
cctgctgtccatctgctctc

SEQ ID NO: 2877 - DNA, 20 bp, synthetic construct
  source 1..20: mol_type = other DNA
ctgagtccagctacgagcag

SEQ ID NO: 2878 - DNA, 20 bp, synthetic construct
  source 1..20: mol_type = other DNA
  misc_feature 1: note = 5' SUN 554 fluorophore
  misc_feature 10: note = Internal ZEN quencher
  misc_feature 20: note = 3' Iowa Black FQ quencher
acaagactgacagggccaaa